(19) United States
(12) Patent Application Publication
(10) Pub. No.: US 2010/0297722 A1
(43) Pub. Date: Nov. 25, 2010

(54) TRANSGENIC MOSS PRODUCING TERPENOIDS

(75) Inventors: Aldwin Macaraig Anterola, Carbondale, IL (US); Ralph Stephen Quatrano, St. Louis, MO (US); Pierre-Francois Perroud, St. Louis, MO (US)

Correspondence Address: SONNENSCHEIN NATH & ROSENTHAL LLP, P.O. BOX 061080, WACKER DRIVE STATION, WILLIS TOWER, CHICAGO, IL, 60606-1080, US

(73) Assignees: BOARD OF TRUSTEES OF SOUTHERN ILLINOIS UNIVERSITY, Carbondale, IL (US); WASHINGTON UNIVERSITY, St. Louis, MO (US)

(21) Appl. No.: 12/783,952

(22) Filed: May 20, 2010

Related U.S. Application Data
(60) Provisional application No. 61/180,123, filed on May 20, 2009.

(51) Int. Cl. C12P 5/02; C12N 15/82; C12N 5/10

(52) U.S. Cl. 435/167; 435/468; 435/419

(57) ABSTRACT

The present invention generally relates to transgenic moss. One aspect of the invention provides a transgenic moss cell that produces or accumulates a terpenoid compound. Another aspect of the invention provides for methods of producing a terpenoid compound through culturing of the transgenic moss.

### CROSS-REFERENCE TO RELATED APPLICATIONS

[0001] This application claims priority from U.S. Provisional Application Ser. No. 61/180,123, filed on May 20, 2009, which is incorporated herein by reference in its entirety.

### STATEMENT REGARDING FEDERALLY SPONSORED RESEARCH OR DEVELOPMENT

[0002] This invention was made in part with Government support under National Institutes of Health Grant 1 R15 CA139416-01. The Government has certain rights in the invention.

### INCORPORATION-BY-REFERENCE OF MATERIAL SUBMITTED ON A COMPACT DISC

[0003] The Sequence Listing, which is a part of the present disclosure, includes a computer readable form comprising nucleotide and/or amino acid sequences of the present invention. The subject matter of the Sequence Listing is incorporated herein by reference in its entirety.

### FIELD OF THE INVENTION

[0004] The present invention generally relates to transgenic moss, more specifically transgenic moss that produces or accumulates a terpenoid compound.

### BACKGROUND

[0005] Various taxoids are promising therapeutic agents. Paclitaxel (commonly known as Taxol™) is a widely prescribed anticancer agent originally isolated as a bioactive component from the bark of Pacific yew (Taxus brevifolia) and later structurally defined as a very complex multi-substituted taxane diterpenoid. Naturally occurring plant taxoids are generally present in extremely low levels. Chemical methods to totally synthesize paclitaxel exist but are not suitable for large-scale commercial production of the drug. Paclitaxel is currently manufactured from an advanced paclitaxel precursor 10-deacetylbaccatin III, extracted from needles of European yew (Taxus baccata); but yields from yew are highly variable and affected by environmental conditions and yew cultivation requires substantial land area, long time prior to harvest, intensive labor, and additional costs for extraction and semisynthesis of the drug.

[0006] Liquid cell suspension cultures of Taxus species can be induced to produce paclitaxel but reproducibility of various induction treatments from one cell line to another have yet to be demonstrated, and Taxus cells (like other cultured plant cells) undergo epigenetic and mutational changes while in culture which can change their totipotency and ability to produce paclitaxel.

[0007] Endophytic fungi living inside Taxus brevifolia are known to produce paclitaxel but do not grow well in culture and produce only minute amounts of paclitaxel. Various approaches have been used to overexpress paclitaxel biosynthetic genes in endophytic fungi to improve paclitaxel production but slow growth of the fungi host cells impose limitations on productivity (see generally, Heinig and Jennewein (2009) African J of Biotech 8(8) 1370-1385).

[0008] Faster-growing heterologous systems such as bacteria and yeasts have been used to overexpress paclitaxel biosynthetic genes but neither yeast nor bacteria has been successful so far in producing advanced paclitaxel precursors.

[0009] Higher plants used as heterologous hosts for overexpression of taxadiene synthase may result in increased taxoids but grow more slowly than wild type, presumably due to disruption in gibberellin biosynthesis.

### SUMMARY OF THE INVENTION

[0010] Among the various aspects of the present invention is the provision of compositions and processes for production of terpenoids from metabolically engineered moss. Such an engineered moss can accumulate a target terpenoid compound, such as a taxoid or intermediate thereof, without substantially deleterious phenotypic consequences.

[0011] One aspect provides a moss cell comprising at least a first heterologous nucleic acid molecule, wherein expression of the heterologous nucleic acid molecule in the cell results in production of at least one target terpenoid compound. The at least one target terpenoid compound can be taxa-4(5),11(12)-diene; taxa-4(20),11(12)-diene; taxa-3(4),11(12)-diene; verticillene; taxadiene-5-ol; 5(12)-oxa-3(11)-cyclotaxane; taxadien-11-ol; taxadien-18-ol; taxadien-20-ol; 5α-hydroxy-taxa-4(20),11(12)-diene; 5α,13α-dihydroxy-taxa-4(20),11(12)-diene; 5α-acetoxy-taxa-4(20),11(12)-diene; 5α-acetoxy-10β-hydroxy-taxa-4(20),11(12)-diene; 5α-acetoxy-10β,14β-dihydroxy-taxadiene; taxadiene-5α-acetoxy-13β-ol; taxadiene-5α,13α-diol; taxadiene-5α-acetoxy-10β-ol; baccatin III; 10-deacetylbaccatin III; abietadiene; abietic acid; steviol; steviolmonoside; stevioside; rebaudioside A; forskolin; sclareol; kaurenoic acid; a cembranoid; momilactone A; momilactone B; oryzalexins A-F; oryzalexin S; and phytocassanes A-E.

[0012] In some embodiments, the moss cell comprises a first heterologous nucleic acid molecule comprising a nucleotide sequence encoding a taxadiene synthase and the moss cell produces or accumulates at least taxa-4(5),11(12)-diene.

[0013] In some embodiments, the moss cell comprises a first heterologous nucleic acid molecule comprising a polynucleotide encoding a taxadiene synthase; and second heterologous nucleic acid molecule comprising a polynucleotide encoding a taxadiene 5α-hydroxylase; and the moss cell produces or accumulates at least taxadiene-5-ol.

[0014] In some embodiments, the moss cell comprises a first heterologous nucleic acid molecule comprising a polynucleotide encoding a taxadiene synthase; a second heterologous nucleic acid molecule comprising a polynucleotide encoding a taxadiene-5α-hydroxylase; a third heterologous nucleic acid molecule comprising a polynucleotide encoding a taxadiene-5α-ol-acetyl transferase; and a fourth heterologous nucleic acid molecule comprising a polynucleotide encoding a taxane-13α-hydroxylase; and the moss cell produces or accumulates at least taxadiene-5α-acetoxy-13β-ol.

[0015] In some embodiments, the moss cell comprises a first heterologous nucleic acid molecule comprising a polynucleotide encoding a taxadiene synthase; a second heterologous nucleic acid molecule comprising a polynucleotide encoding a taxadiene-5α-hydroxylase; and a third heterologous nucleic acid molecule comprising a polynucleotide encoding a taxane-13α-hydroxylase; and the moss cell produces or accumulates at least taxadiene-5α,13α-diol.

[0016] In some embodiments, the moss cell comprises a first heterologous nucleic acid molecule comprising a polynucleotide encoding a taxadiene synthase; a second heterologous nucleic acid molecule comprising a polynucleotide encoding a taxadiene-5α-hydroxylase; a third heterologous nucleic acid molecule comprising a polynucleotide encoding a taxadiene-5α-ol-acetyl transferase; and a fourth heterologous nucleic acid molecule comprising a polynucleotide encoding a taxane-10β-hydroxylase; and the moss cell produces or accumulates at least taxadiene-5α-acetoxy-10β-ol.

[0017] In some embodiments, the moss cell comprises a first heterologous nucleic acid molecule comprising a polynucleotide encoding a taxadiene synthase; a second heterologous nucleic acid molecule comprising a polynucleotide encoding a taxadiene-5α-hydroxylase; a third heterologous nucleic acid molecule comprising a polynucleotide encoding a taxadiene-5α-ol-acetyl transferase; a fourth heterologous nucleic acid molecule comprising a polynucleotide encoding a taxane-10β-hydroxylase; a fifth heterologous nucleic acid molecule comprising a polynucleotide encoding a taxane-13α-hydroxylase; a sixth heterologous nucleic acid molecule comprising a polynucleotide encoding a taxoid-9α-hydroxylase; a seventh heterologous nucleic acid molecule comprising a polynucleotide encoding a taxoid-2α-hydroxylase; an eighth heterologous nucleic acid molecule comprising a polynucleotide encoding a taxoid-7β-hydroxylase; a ninth heterologous nucleic acid molecule comprising a polynucleotide encoding a 2α-hydroxytaxane 2-O-benzoyltransferase; a tenth heterologous nucleic acid molecule comprising a polynucleotide encoding a taxoid C1β-hydroxylase; and a eleventh heterologous nucleic acid molecule comprising a polynucleotide encoding a taxoid C4β, C20-epoxidase; and the moss cell produces or accumulates at least 10-deacetylbaccatin III.

[0018] In some embodiments, the moss cell comprises a first heterologous nucleic acid molecule comprising a nucleotide sequence encoding an abietadiene synthase; and the moss cell produces or accumulates at least abietadiene.

[0019] In some embodiments, the moss cell comprises a first heterologous nucleic acid molecule comprising a nucleotide sequence encoding an abietadiene synthase; and a second heterologous nucleic acid molecule comprising a nucleotide sequence encoding an abietadienol/abietadienal oxidase; and the moss cell produces or accumulates at least abietic acid.

[0020] In some embodiments, the moss cell comprises a first heterologous nucleic acid molecule comprising a nucleotide sequence encoding an ent-copalyl diphosphate synthase; a second heterologous nucleic acid molecule comprising a nucleotide sequence encoding an ent-Kaurene synthase; a third heterologous nucleic acid molecule comprising a nucleotide sequence encoding an ent-Kaurene oxidase; and a fourth heterologous nucleic acid molecule comprising a nucleotide sequence encoding an kaurenoic acid 13-hydroxylase; and the moss cell produces or accumulates at least steviol.

[0021] In some embodiments, the moss cell comprises a first heterologous nucleic acid molecule comprising a nucleotide sequence encoding an ent-copalyl diphosphate synthase; a second heterologous nucleic acid molecule comprising a nucleotide sequence encoding an ent-Kaurene synthase; a third heterologous nucleic acid molecule comprising a nucleotide sequence encoding an ent-Kaurene oxidase; a fourth heterologous nucleic acid molecule comprising a nucleotide sequence encoding an kaurenoic acid 13-hydroxylase; and a fifth heterologous nucleic acid molecule comprising a nucleotide sequence encoding an UDP-glycosyltransferase (UGT) UGT85C2; and the moss cell produces or accumulates at least steviolmonoside.

[0022] In some embodiments, the moss cell comprises a first heterologous nucleic acid molecule comprising a nucleotide sequence encoding an ent-copalyl diphosphate synthase; a second heterologous nucleic acid molecule comprising a nucleotide sequence encoding an ent-Kaurene synthase; a third heterologous nucleic acid molecule comprising a nucleotide sequence encoding an ent-Kaurene oxidase; a fourth heterologous nucleic acid molecule comprising a nucleotide sequence encoding an kaurenoic acid 13-hydroxylase; a fifth heterologous nucleic acid molecule comprising a nucleotide sequence encoding an UDP-glycosyltransferase (UGT) UGT85C2; and a sixth heterologous nucleic acid molecule comprising a nucleotide sequence encoding a UGT74G1; and the moss cell produces or accumulates at least stevioside.

[0023] In some embodiments, the moss cell comprises a first heterologous nucleic acid molecule comprising a nucleotide sequence encoding an ent-copalyl diphosphate synthase; a second heterologous nucleic acid molecule comprising a nucleotide sequence encoding an ent-Kaurene synthase; a third heterologous nucleic acid molecule comprising a nucleotide sequence encoding an ent-Kaurene oxidase; a fourth heterologous nucleic acid molecule comprising a nucleotide sequence encoding an kaurenoic acid 13-hydroxylase; a fifth heterologous nucleic acid molecule comprising a nucleotide sequence encoding an UDP-glycosyltransferase (UGT) UGT85C2; a sixth heterologous nucleic acid molecule comprising a nucleotide sequence encoding a UGT74G1; and a seventh heterologous nucleic acid molecule comprising a nucleotide sequence encoding a UGT76G1; and the moss cell produces or accumulates at least rebaudioside A.

[0024] In some embodiments, the moss cell comprises a first heterologous nucleic acid molecule comprising a nucleotide sequence encoding an ent-copalyl diphosphate synthase; a second heterologous nucleic acid molecule comprising a nucleotide sequence encoding an ent-Kaurene synthase; a third heterologous nucleic acid molecule comprising a nucleotide sequence encoding an ent-Kaurene oxidase; and the moss cell produces or accumulates at least kaurenoic acid.

[0025] In some embodiments, the moss cell comprises a first heterologous nucleic acid molecule comprising a nucleotide sequence encoding a CBT-ol cyclase; and a second heterologous nucleic acid molecule comprising a nucleotide sequence encoding a CYP71D16; and the moss cell produces or accumulates at least a cembranoid.

[0026] In some embodiments, the moss cell comprises a first heterologous nucleic acid molecule comprising a nucleotide sequence encoding a syn-copalyl diphosphate synthase; and a second heterologous nucleic acid molecule comprising a nucleotide sequence encoding a syn-pimaradiene synthase; and the moss cell produces or accumulates at least momilactones A and B.

[0027] In some embodiments, the moss cell comprises a first heterologous nucleic acid molecule comprising a nucleotide sequence encoding a ent-Copalyl diphosphate synthase; and a second heterologous nucleic acid molecule comprising a nucleotide sequence encoding a ent-sandaracopimaradiene synthase; and the moss cell produces or accumulates at least one of oryzalexins A-F.

[0028] In some embodiments, the moss cell comprises a first heterologous nucleic acid molecule comprising a nucleotide sequence encoding a syn-copalyl diphosphate synthase; and a second heterologous nucleic acid molecule comprising a nucleotide sequence encoding a syn-stemarene synthase; and the moss cell produces or accumulates at least oryzalexin S.

[0029] In some embodiments, the moss cell comprises a first heterologous nucleic acid molecule comprising a nucleotide sequence encoding a ent-Copalyl diphosphate synthase; and a second heterologous nucleic acid molecule comprising a nucleotide sequence encoding a ent-cassadiene synthase; and the moss cell produces or accumulates at least one of phytocassanes A-E.

[0030] In some embodiments, the moss cell comprises a nucleotide sequence encoding a taxadiene synthase selected from the group consisting of: a nucleotide sequence of SEQ ID NO: 1, SEQ ID NO: 3, SEQ ID NO: 5, SEQ ID NO: 7, SEQ ID NO: 9, SEQ ID NO: 11, SEQ ID NO: 13, SEQ ID NO: 15, or SEQ ID NO: 17, or at least about 90% sequence identity to any one of these sequences encoding a polypeptide having taxadiene synthase activity, or a complementary sequence thereto; a nucleotide sequence encoding a polypeptide having SEQ ID NO: 2, SEQ ID NO: 4, SEQ ID NO: 6, SEQ ID NO: 8, SEQ ID NO: 10, SEQ ID NO: 12, SEQ ID NO: 14, SEQ ID NO: 16, or SEQ ID NO: 18, or at least about 90% sequence identity to any one of these sequences having taxadiene synthase activity, or a complementary sequence thereto; and an isolated polynucleotide that hybridizes under stringent conditions thereto over the entire length of said sequence; said stringent conditions comprising incubation at 65° C. in a solution comprising 6×SSC (0.9 M sodium chloride and 0.09 M sodium citrate); and which encodes a polypeptide having taxadiene synthase activity.

[0031] In some embodiments, the moss cell comprises a nucleotide sequence encoding a taxadiene 5α-hydroxylase selected from the group consisting of: a nucleotide sequence of SEQ ID NO: 19 or SEQ ID NO: 21, or at least about 90% sequence identity to any one of these sequences encoding a polypeptide having taxadiene 5α-hydroxylase activity, or a complementary sequence thereto; a nucleotide sequence encoding a polypeptide having SEQ ID NO: 20 or SEQ ID NO: 22, or at least about 90% sequence identity to any one of these sequences having taxadiene 5α-hydroxylase activity, or a complementary sequence thereto; and an isolated polynucleotide that hybridizes under stringent conditions thereto over the entire length of said sequence; said stringent conditions comprising incubation at 65° C. in a solution comprising 6×SSC (0.9 M sodium chloride and 0.09 M sodium citrate); and which encodes a polypeptide having taxadiene 5α-hydroxylase activity.

[0032] In some embodiments, the moss cell comprises a nucleotide sequence encoding a taxadiene-5α-ol-acetyl transferase selected from the group consisting of: a nucleotide sequence of SEQ ID NO: 23, SEQ ID NO: 25, or SEQ ID NO: 201, or at least about 90% sequence identity to any one of these sequences encoding a polypeptide having taxadiene-5α-ol-acetyl transferase activity, or a complementary sequence thereto; a nucleotide sequence encoding a polypeptide having SEQ ID NO: 24, SEQ ID NO: 26, or SEQ ID NO: 202, or at least about 90% sequence identity to any one of these sequences having—taxadiene-5α-ol-acetyl transferase activity, or a complementary sequence thereto; and an isolated polynucleotide that hybridizes under stringent conditions thereto over the entire length of said sequence; said stringent conditions comprising incubation at 65° C. in a solution comprising 6×SSC (0.9 M sodium chloride and 0.09 M sodium citrate); and which encodes a polypeptide having taxadiene-5α-ol-acetyl transferase activity.

[0033] In some embodiments, the moss cell comprises a nucleotide sequence encoding a taxane-13α-hydroxylase selected from the group consisting of: a nucleotide sequence of SEQ ID NO: 27, SEQ ID NO: 29, or SEQ ID NO: 31, or at least about 90% sequence identity to any one of these sequences encoding a polypeptide having taxane-13α-hydroxylase activity, or a complementary sequence thereto; a nucleotide sequence encoding a polypeptide having SEQ ID NO: 28, SEQ ID NO: 30, or SEQ ID NO: 32, or at least about 90% sequence identity to any one of these sequences having taxane-13α-hydroxylase activity, or a complementary sequence thereto; and an isolated polynucleotide that hybridizes under stringent conditions thereto over the entire length of said sequence; said stringent conditions comprising incubation at 65° C. in a solution comprising 6×SSC (0.9 M sodium chloride and 0.09 M sodium citrate); and which encodes a polypeptide having taxane-13α-hydroxylase activity.

[0034] In some embodiments, the moss cell comprises a nucleotide sequence encoding a taxane-10β-hydroxylase selected from the group consisting of: a nucleotide sequence of SEQ ID NO: 33, SEQ ID NO: 35, SEQ ID NO: 37, or SEQ ID NO: 39, or at least about 90% sequence identity to any one of these sequences encoding a polypeptide having taxane-10β-hydroxylase activity, or a complementary sequence thereto; a nucleotide sequence encoding a polypeptide having SEQ ID NO: 34, SEQ ID NO: 36, SEQ ID NO: 38, or SEQ ID NO: 40, or at least about 90% sequence identity to any one of these sequences having taxane-10β-hydroxylase activity, or a complementary sequence thereto; and an isolated polynucleotide that hybridizes under stringent conditions thereto over the entire length of said sequence; said stringent conditions comprising incubation at 65° C. in a solution comprising 6×SSC (0.9 M sodium chloride and 0.09 M sodium citrate); and which encodes a polypeptide having taxane-10β-hydroxylase activity.

[0035] In some embodiments, the moss cell comprises a nucleotide sequence encoding a taxoid-2α-hydroxylase selected from the group consisting of: a nucleotide sequence of SEQ ID NO: 41 or SEQ ID NO: 43, or at least about 90% sequence identity to any one of these sequences encoding a polypeptide having taxoid-2α-hydroxylase activity, or a complementary sequence thereto; a nucleotide sequence encoding a polypeptide having SEQ ID NO: 42 or SEQ ID NO: 44, or at least about 90% sequence identity to any one of these sequences having taxoid-2α-hydroxylase activity, or a complementary sequence thereto; and an isolated polynucleotide that hybridizes under stringent conditions thereto over the entire length of said sequence; said stringent conditions comprising incubation at 65° C. in a solution comprising 6×SSC (0.9 M sodium chloride and 0.09 M sodium citrate); and which encodes a polypeptide having taxoid-2α-hydroxylase activity.

[0036] In some embodiments, the moss cell comprises a nucleotide sequence encoding a taxoid-7β-hydroxylase selected from the group consisting of: a nucleotide sequence of SEQ ID NO: 45 or SEQ ID NO: 47, or at least about 90% sequence identity to any one of these sequences encoding a polypeptide having taxoid-7β-hydroxylase activity, or a complementary sequence thereto; a nucleotide sequence encoding a polypeptide having SEQ ID NO: 46 or SEQ ID NO: 48, or at least about 90% sequence identity to any one of these sequences having taxoid-7β-hydroxylase activity, or a complementary sequence thereto; and an isolated polynucleotide that hybridizes under stringent conditions thereto over the entire length of said sequence; said stringent conditions comprising incubation at 65° C. in a solution comprising 6×SSC (0.9 M sodium chloride and 0.09 M sodium citrate); and which encodes a polypeptide having taxoid-7β-hydroxylase activity.

[0037] In some embodiments, the moss cell comprises a nucleotide sequence encoding a 2α-hydroxytaxane 2-O-benzoyltransferase selected from the group consisting of: a nucleotide sequence of SEQ ID NO: SEQ ID NO: 49, SEQ ID NO: 51, SEQ ID NO: 53, SEQ ID NO: 55, SEQ ID NO: 57, or SEQ ID NO: 59, or at least about 90% sequence identity to any one of these sequences encoding a polypeptide having 2α-hydroxytaxane 2-O-benzoyltransferase activity, or a complementary sequence thereto; a nucleotide sequence encoding a polypeptide having SEQ ID NO: 50, SEQ ID NO: 52, SEQ ID NO: 54, SEQ ID NO: 56, SEQ ID NO: 58, or SEQ ID NO: 60, or at least about 90% sequence identity to any one of these sequences having 2α-hydroxytaxane 2-O-benzoyltransferase activity, or a complementary sequence thereto; and an isolated polynucleotide that hybridizes under stringent conditions thereto over the entire length of said sequence; said stringent conditions comprising incubation at 65° C. in a solution comprising 6×SSC (0.9 M sodium chloride and 0.09 M sodium citrate); and which encodes a polypeptide having 2α-hydroxytaxane 2-O-benzoyltransferase activity.

[0038] In some embodiments, the moss cell comprises a nucleotide sequence encoding an abietadiene synthase selected from the group consisting of: a nucleotide sequence of SEQ ID NO: 61, SEQ ID NO: 63, SEQ ID NO: 65, or SEQ ID NO: 67, or at least about 90% sequence identity to any one of these sequences encoding a polypeptide having abietadiene synthase activity, or a complementary sequence thereto; a nucleotide sequence encoding a polypeptide having SEQ ID NO: 62, SEQ ID NO: 64, SEQ ID NO: 66, or SEQ ID NO: 68, or at least about 90% sequence identity to any one of these sequences having abietadiene synthase activity, or a complementary sequence thereto; and an isolated polynucleotide that hybridizes under stringent conditions thereto over the entire length of said sequence; said stringent conditions comprising incubation at 65° C. in a solution comprising 6×SSC (0.9 M sodium chloride and 0.09 M sodium citrate); and which encodes a polypeptide having abietadiene synthase activity.

[0039] In some embodiments, the moss cell comprises a nucleotide sequence encoding an abietadienol/abietadienal oxidase selected from the group consisting of: a nucleotide sequence of SEQ ID NO: 69, or at least about 90% sequence identity to any one of these sequences encoding a polypeptide having abietadienol/abietadienal oxidase activity, or a complementary sequence thereto; a nucleotide sequence encoding a polypeptide having SEQ ID NO: 70, or at least about 90% sequence identity to any one of these sequences having—abietadienol/abietadienal oxidase activity, or a complementary sequence thereto; and an isolated polynucleotide that hybridizes under stringent conditions thereto over the entire length of said sequence; said stringent conditions comprising incubation at 65° C. in a solution comprising 6×SSC (0.9 M sodium chloride and 0.09 M sodium citrate); and which encodes a polypeptide having abietadienol/abietadienal oxidase activity.

[0040] In some embodiments, the moss cell comprises a nucleotide sequence encoding a ent-copalyl diphosphate synthase selected from the group consisting of: a nucleotide sequence of SEQ ID NO: 71, SEQ ID NO: 73, SEQ ID NO: 75, SEQ ID NO: 77, SEQ ID NO: 79, SEQ ID NO: 81, SEQ ID NO: 83, SEQ ID NO: 85, SEQ ID NO: 87, SEQ ID NO: 89, SEQ ID NO: 91, SEQ ID NO: 93, SEQ ID NO: 95, SEQ ID NO: 97, SEQ ID NO: 99, SEQ ID NO: 101, SEQ ID NO: 103, SEQ ID NO: 105, SEQ ID NO: 107, SEQ ID NO: 109, SEQ ID NO: 111, SEQ ID NO: 113, or SEQ ID NO: 115, or at least about 90% sequence identity to any one of these sequences encoding a polypeptide having ent-copalyl diphosphate synthase activity, or a complementary sequence thereto; a nucleotide sequence encoding a polypeptide having SEQ ID NO: 72, SEQ ID NO: 74, SEQ ID NO: 76, SEQ ID NO: 78, SEQ ID NO: 80, SEQ ID NO: 82, SEQ ID NO: 84, SEQ ID NO: 86, SEQ ID NO: 88, SEQ ID NO: 90, SEQ ID NO: 92, SEQ ID NO: 94, SEQ ID NO: 96, SEQ ID NO: 98, SEQ ID NO: 100, SEQ ID NO: 102, SEQ ID NO: 104, SEQ ID NO: 106, SEQ ID NO: 108, SEQ ID NO: 110, SEQ ID NO: 112, SEQ ID NO: 114, or SEQ ID NO: 116, or at least about 90% sequence identity to any one of these sequences having ent-copalyl diphosphate synthase activity, or a complementary sequence thereto; and an isolated polynucleotide that hybridizes under stringent conditions thereto over the entire length of said sequence; said stringent conditions comprising incubation at 65° C. in a solution comprising 6×SSC (0.9 M sodium chloride and 0.09 M sodium citrate); and which encodes a polypeptide having ent-copalyl diphosphate synthase activity.

[0041] In some embodiments, the moss cell comprises a nucleotide sequence encoding an ent-Kaurene synthase selected from the group consisting of: a nucleotide sequence of SEQ ID NO: 117, SEQ ID NO: 119, SEQ ID NO: 121, SEQ ID NO: 123, SEQ ID NO: 125, SEQ ID NO: 127, SEQ ID NO: 129, SEQ ID NO: 131, SEQ ID NO: 133, SEQ ID NO: 135, SEQ ID NO: 137, SEQ ID NO: 139, SEQ ID NO: 141, or SEQ ID NO: 143, or at least about 90% sequence identity to any one of these sequences encoding a polypeptide having ent-Kaurene synthase activity, or a complementary sequence thereto; a nucleotide sequence encoding a polypeptide having SEQ ID NO: 118, SEQ ID NO: 120, SEQ ID NO: 122, SEQ ID NO: 124, SEQ ID NO: 126, SEQ ID NO: 128, SEQ ID NO: 130, SEQ ID NO: 132, SEQ ID NO: 134, SEQ ID NO: 136, SEQ ID NO: 138, SEQ ID NO: 140, SEQ ID NO: 142, or SEQ ID NO: 144, or at least about 90% sequence identity to any one of these sequences having ent-Kaurene synthase activity, or a complementary sequence thereto; and an isolated polynucleotide that hybridizes under stringent conditions thereto over the entire length of said sequence; said stringent conditions comprising incubation at 65° C. in a solution comprising 6×SSC (0.9 M sodium chloride and 0.09 M sodium citrate); and which encodes a polypeptide having ent-Kaurene synthase activity.

[0042] In some embodiments, the moss cell comprises a nucleotide sequence encoding an ent-Kaurene oxidase selected from the group consisting of: a nucleotide sequence of SEQ ID NO: 145, SEQ ID NO: 147, SEQ ID NO: 149, SEQ ID NO: 151, SEQ ID NO: 153, SEQ ID NO: 155, SEQ ID NO: 157, SEQ ID NO: 159, SEQ ID NO: 161, SEQ ID NO: 163, SEQ ID NO: 165, SEQ ID NO: 167, SEQ ID NO: 169, SEQ ID NO: 171, or SEQ ID NO: 173, or at least about 90% sequence identity to any one of these sequences encoding a polypeptide having ent-Kaurene oxidase activity, or a complementary sequence thereto; a nucleotide sequence encoding a polypeptide having SEQ ID NO: 146, SEQ ID NO: 148, SEQ ID NO: 150, SEQ ID NO: 152, SEQ ID NO: 154, SEQ ID NO: 156, SEQ ID NO: 158, SEQ ID NO: 160, SEQ ID NO: 162, SEQ ID NO: 164, SEQ ID NO: 166, SEQ ID NO: 168, SEQ ID NO: 170, SEQ ID NO: 172, or SEQ ID NO: 174, or at least about 90% sequence identity to any one of these sequences having ent-Kaurene oxidase activity, or a complementary sequence thereto; and an isolated polynucleotide that hybridizes under stringent conditions thereto over the entire length of said sequence; said stringent conditions comprising incubation at 65° C. in a solution comprising 6×SSC (0.9 M sodium chloride and 0.09 M sodium citrate); and which encodes a polypeptide having ent-Kaurene oxidase activity.

[0043] In some embodiments, the moss cell comprises a nucleotide sequence encoding a kaurenoic acid 13-hydroxylase selected from the group consisting of: a nucleotide sequence of SEQ ID NO: 175, or at least about 90% sequence identity to any one of these sequences encoding a polypeptide having kaurenoic acid 13-hydroxylase activity, or a complementary sequence thereto; a nucleotide sequence encoding a polypeptide having SEQ ID NO: 176, or at least about 90% sequence identity to any one of these sequences having kaurenoic acid 13-hydroxylase activity, or a complementary sequence thereto; and an isolated polynucleotide that hybridizes under stringent conditions thereto over the entire length of said sequence; said stringent conditions comprising incubation at 65° C. in a solution comprising 6×SSC (0.9 M sodium chloride and 0.09 M sodium citrate); and which encodes a polypeptide having kaurenoic acid 13-hydroxylase activity.

[0044] In some embodiments, the moss cell comprises a nucleotide sequence encoding a UDP-glycosyltransferase UGT85C2 selected from the group consisting of: a nucleotide sequence of SEQ ID NO: 177, or at least about 90% sequence identity to any one of these sequences encoding a polypeptide having UDP-glycosyltransferase activity, or a complementary sequence thereto; a nucleotide sequence encoding a polypeptide having SEQ ID NO: 178, or at least about 90% sequence identity to any one of these sequences having UDP-glycosyltransferase activity, or a complementary sequence thereto; and an isolated polynucleotide that hybridizes under stringent conditions thereto over the entire length of said sequence; said stringent conditions comprising incubation at 65° C. in a solution comprising 6×SSC (0.9 M sodium chloride and 0.09 M sodium citrate); and which encodes a polypeptide having UDP-glycosyltransferase activity.

[0045] In some embodiments, the moss cell comprises a nucleotide sequence encoding a UDP-glycosyltransferase UGT74G1 selected from the group consisting of: a nucleotide sequence of SEQ ID NO: 179, or at least about 90% sequence identity to any one of these sequences encoding a polypeptide having UDP-glycosyltransferase activity, or a complementary sequence thereto; a nucleotide sequence encoding a polypeptide having SEQ ID NO: 180, or at least about 90% sequence identity to any one of these sequences having UDP-glycosyltransferase activity, or a complementary sequence thereto; and an isolated polynucleotide that hybridizes under stringent conditions thereto over the entire length of said sequence; said stringent conditions comprising incubation at 65° C. in a solution comprising 6×SSC (0.9 M sodium chloride and 0.09 M sodium citrate); and which encodes a polypeptide having UDP-glycosyltransferase activity.

[0046] In some embodiments, the moss cell comprises a nucleotide sequence encoding a UDP-glycosyltransferase UGT76G1 selected from the group consisting of: a nucleotide sequence of SEQ ID NO: 181, or at least about 90% sequence identity to any one of these sequences encoding a polypeptide having UDP-glycosyltransferase activity, or a complementary sequence thereto; a nucleotide sequence encoding a polypeptide having SEQ ID NO: 182, or at least about 90% sequence identity to any one of these sequences having UDP-glycosyltransferase activity, or a complementary sequence thereto; and an isolated polynucleotide that hybridizes under stringent conditions thereto over the entire length of said sequence; said stringent conditions comprising incubation at 65° C. in a solution comprising 6×SSC (0.9 M sodium chloride and 0.09 M sodium citrate); and which encodes a polypeptide having UDP-glycosyltransferase activity.

[0047] In some embodiments, the moss cell comprises a nucleotide sequence encoding a CBT-ol cyclase selected from the group consisting of: a nucleotide sequence of SEQ ID NO: 183 or SEQ ID NO: 185, or at least about 90% sequence identity to any one of these sequences encoding a polypeptide having CBT-ol cyclase activity, or a complementary sequence thereto; a nucleotide sequence encoding a polypeptide having SEQ ID NO: 184 or SEQ ID NO: 186, or at least about 90% sequence identity to any one of these sequences having CBT-ol cyclase activity, or a complementary sequence thereto; and an isolated polynucleotide that hybridizes under stringent conditions thereto over the entire length of said sequence; said stringent conditions comprising incubation at 65° C. in a solution comprising 6×SSC (0.9 M sodium chloride and 0.09 M sodium citrate); and which encodes a polypeptide having CBT-ol cyclase activity.

[0048] In some embodiments, the moss cell comprises a nucleotide sequence encoding a CYP71D16 selected from the group consisting of: a nucleotide sequence of SEQ ID NO: 187, or at least about 90% sequence identity to any one of these sequences encoding a polypeptide having—CYP71D16 activity, or a complementary sequence thereto; a nucleotide sequence encoding a polypeptide having SEQ ID NO: 188, or at least about 90% sequence identity to any one of these sequences having CYP71D16 activity, or a complementary sequence thereto; and an isolated polynucleotide that hybridizes under stringent conditions thereto over the entire length of said sequence; said stringent conditions comprising incubation at 65° C. in a solution comprising 6×SSC (0.9 M sodium chloride and 0.09 M sodium citrate); and which encodes a polypeptide having CYP71D16 activity.

[0049] In some embodiments, the moss cell comprises a nucleotide sequence encoding a syn-copalyl diphosphate synthase selected from the group consisting of: a nucleotide sequence of SEQ ID NO: 189, or at least about 90% sequence identity to any one of these sequences encoding a polypeptide having syn-copalyl diphosphate synthase activity, or a complementary sequence thereto; a nucleotide sequence encoding a polypeptide having SEQ ID NO: 190, or at least about 90% sequence identity to any one of these sequences having—syn-copalyldiphosphate synthase activity, or a complementary sequence thereto; and an isolated polynucleotide that hybridizes under stringent conditions thereto over the entire length of said sequence; said stringent conditions comprising incubation at 65° C. in a solution comprising 6×SSC (0.9 M sodium chloride and 0.09 M sodium citrate); and which encodes a polypeptide having syn-copalyl diphosphate synthase activity.

[0050] In some embodiments, the moss cell comprises a nucleotide sequence encoding a syn-pimaradiene synthase selected from the group consisting of: a nucleotide sequence of SEQ ID NO: 191 or SEQ ID NO: 193, or at least about 90% sequence identity to any one of these sequences encoding a polypeptide having syn-pimaradiene synthase activity, or a complementary sequence thereto; a nucleotide sequence encoding a polypeptide having SEQ ID NO: 192 or SEQ ID NO: 194, or at least about 90% sequence identity to any one of these sequences having syn-pimaradiene synthase activity, or a complementary sequence thereto; and an isolated polynucleotide that hybridizes under stringent conditions thereto over the entire length of said sequence; said stringent conditions comprising incubation at 65° C. in a solution comprising 6×SSC (0.9 M sodium chloride and 0.09 M sodium citrate); and which encodes a polypeptide having syn-pimaradiene synthase activity.

[0051] In some embodiments, the moss cell comprises a nucleotide sequence encoding an ent-sandaracopimaradiene synthase selected from the group consisting of: a nucleotide sequence of SEQ ID NO: 195, or at least about 90% sequence identity to any one of these sequences encoding a polypeptide having ent-sandaracopimaradiene synthaseent-sandaracopimaradiene synthase activity, or a complementary sequence thereto; a nucleotide sequence encoding a polypeptide having SEQ ID NO: 196, or at least about 90% sequence identity to any one of these sequences having ent-sandaracopimaradiene synthase activity, or a complementary sequence thereto; and an isolated polynucleotide that hybridizes under stringent conditions thereto over the entire length of said sequence; said stringent conditions comprising incubation at 65° C. in a solution comprising 6×SSC (0.9 M sodium chloride and 0.09 M sodium citrate); and which encodes a polypeptide having ent-sandaracopimaradiene synthase activity.

[0052] In some embodiments, the moss cell comprises a nucleotide sequence encoding a syn-stemarene synthase selected from the group consisting of: a nucleotide sequence of SEQ ID NO: 197, or at least about 90% sequence identity to any one of these sequences encoding a polypeptide having syn-stemarene synthase activity, or a complementary sequence thereto; a nucleotide sequence encoding a polypeptide having SEQ ID NO: 198, or at least about 90% sequence identity to any one of these sequences having syn-stemarene synthase activity, or a complementary sequence thereto; and an isolated polynucleotide that hybridizes under stringent conditions thereto over the entire length of said sequence; said stringent conditions comprising incubation at 65° C. in a solution comprising 6×SSC (0.9 M sodium chloride and 0.09 M sodium citrate); and which encodes a polypeptide having syn-stemarene synthase activity.

[0053] In some embodiments, the moss cell comprises a nucleotide sequence encoding an ent-cassadiene synthase selected from the group consisting of: a nucleotide sequence of SEQ ID NO: 199, or at least about 90% sequence identity to any one of these sequences encoding a polypeptide having ent-cassadiene synthase activity, or a complementary sequence thereto; a nucleotide sequence encoding a polypeptide having SEQ ID NO: 200, or at least about 90% sequence identity thereto having ent-cassadiene synthase activity, or a complementary sequence thereto; and an isolated polynucleotide that hybridizes under stringent conditions thereto over the entire length of said sequence; said stringent conditions comprising incubation at 65° C. in a solution comprising 6×SSC (0.9 M sodium chloride and 0.09 M sodium citrate); and which encodes a polypeptide having ent-cassadiene synthase activity.

[0054] In some embodiments, the moss cell comprises a promoter functional in a moss cell; and a transcriptional termination sequence; wherein the promoter, the heterologous nucleic acid molecule, and the transcriptional termination sequence are operably associated in the 5′ to 3′ direction of transcription.

[0055] In some embodiments, the moss cell has reduced or eliminated expression or activity for one or more of Mevalonate diphosphate decarboxylase; Mevalonate kinase; HMG-CoA reductase; Squalene epoxidase; 4-Hydroxyphenylpyruvate dioxygenase; Geranylgeranyl pyrophosphate synthase; ent-Kaurene synthetase; Chorismate mutase; Farnesyl pyrophosphate synthase; Phytoene synthase; Adenylate isopentenyltransferase; Squalene-hopene-cyclase; γ-Tocopherol methyltransferase; Geranylgeranyl reductase; Phytoene desaturase; ζ-Carotene desaturase; Geranylgeranyltransferase I; Zeaxanthin epoxidase; Copalyl diphosphate synthase; 2-Heptaprenyl-1,4-naphthoquinone methyltransferase; 9-cis-Epoxycarotenoid cleavage dioxygenase; 1-Deoxy-D-xylulose 5-phosphate synthase; Lycopene ε cyclase; and 2-Methyl-6-phytylhydroquinone 3-methyltransferase.

[0056] In some embodiments, the moss cell has reduced or eliminated expression or activity of diterpene synthase or kaurene synthase and the moss cell produces or accumulates decreased levels of ent-kaurene or 16-hydroxykaurane compared to a moss cell not comprising the DNA construct.

[0057] Another aspect provides a moss cell comprising at least one terpenoid compound selected from the group consisting of taxa-4(5),11(12)-diene; taxa-4(20),11(12)-diene; taxa-3(4),11(12)-diene; verticillene; taxadiene-5-ol; 5(12)-oxa-3(11)-cyclotaxane; taxadien-11-ol; taxadien-18-ol; taxadien-20-ol; 5α-hydroxy-taxa-4(20),11(12)-diene; 5α,13α-dihydroxy-taxa-4(20),11(12)-diene; 5α-acetoxy-taxa-4(20),11(12)-diene; 5α-acetoxy-10β-hydroxy-taxa-4(20),11(12)-diene; 5α-acetoxy-10β,14β-dihydroxy-taxadiene; taxadiene-5α-acetoxy-13β-ol; taxadiene-5α,13α-diol; taxadiene-5α-acetoxy-10β-ol; baccatin III; 10-deacetylbaccatin III; abietadiene; abietic acid; steviol; steviolmonoside; stevioside; rebaudioside A; forskolin; sclareol; kaurenoic acid; a cembranoid; momilactone A; momilactone B; oryzalexins A-F; oryzalexin S; and phytocassanes A-E.

[0058] Another aspect provides a method of producing a terpenoid compound comprising culturing a moss cell described above. In some embodiments, the method further comprises isolating the terpenoid compound.

[0059] Another aspect provides a method of producing a moss cell described above comprising: introducing in the moss cell at least a first heterologous nucleic acid molecule; wherein expression of the heterologous nucleic acid molecule in the cell results in production or accumulation of at least one terpenoid compound selected from the group consisting of taxa-4(5),11(12)-diene; taxa-4(20),11(12)-diene; taxa-3(4),11(12)-diene; verticillene; taxadiene-5-ol; 5(12)-oxa-3(11)-cyclotaxane; taxadien-11-ol; taxadien-18-ol; taxadien-20-ol; 5α-hydroxy-taxa-4(20),11(12)-diene; 5α,13α-dihydroxy-taxa-4(20),11(12)-diene; 5α-acetoxy-taxa-4(20),11(12)-diene; 5α-acetoxy-10β-hydroxy-taxa-4(20),11(12)-diene; 5α-acetoxy-10β,14β-dihydroxy-taxadiene; taxadiene-5α-acetoxy-13β-ol; taxadiene-5α,13α-diol; taxadiene-5α-acetoxy-10β-ol; baccatin III; 10-deacetylbaccatin III; abietadiene; abietic acid; steviol; steviolmonoside; stevioside; rebaudioside A; forskolin; sclareol; kaurenoic acid; a cembranoid; momilactone A; momilactone B; oryzalexins A-F; oryzalexin S; and phytocassanes A-E.

[0060] Other objects and features will be in part apparent and in part pointed out hereinafter.

### BRIEF DESCRIPTION OF THE DRAWINGS

[0061] Those of skill in the art will understand that the drawings, described below, are for illustrative purposes only. The drawings are not intended to limit the scope of the present teachings in any way.

[0062] FIG. 1 is a series of graphs depicting GC-MS analysis of hexane extracts from wild type and transgenic Physcomitrella patens overexpressing taxadiene synthase. FIG. 1A shows GC-MS analysis of hexane extracts from wild type Physcomitrella patens. FIG. 1B shows GC-MS analysis of hexane extracts from transgenic Physcomitrella patens overexpressing taxadiene synthase. A new peak labeled 1 in FIG. 1B is found in transgenic moss but not in wild type. FIG. 1C shows the mass spectral fragmentation pattern of peak 1 of FIG. 1B. The mass spectral fragmentation pattern of peak 1 matches that of taxa-4(5),11(12)-diene. Peaks 2 and 3 have been identified as ent-kaurene and 16-hydroxykaurane, respectively, by comparison of their retention times and mass spectra with authentic chemical standards.

[0063] FIG. 2 is a graph depicting GC-MS analysis of hexane extracts from transgenic Physcomitrella patens overexpressing taxadiene synthase (top) and both taxadiene synthase and taxadiene 5-hydroxylase (bottom). Peak 2A is taxadiene-5-ol, based on selected masses (diagnostic of taxadiene-5-ol) used to generate the chromatogram. Note that there is no peak in 1A. The large peak next to 2A is ent-kaurene. Taxadiene was also found in both samples at ˜46.0 min (not shown).

[0064] FIG. 3 is a series of graphs depicting GC-MS analysis of hexane extracts from transgenic Physcomitrella patens protonema overexpressing taxadiene synthase and/or taxadiene 5-hydroxylase. FIG. 3A shows transgenic moss protonema overexpressing taxadiene synthase. FIG. 3B shows transgenic moss protonema overexpressing both taxadiene synthase and taxadiene 5-hydroxylase. FIG. 3C shows wild type moss protonema. FIG. 3D shows a mass fragmentation pattern of peak 1A from FIG. 3A. FIG. 3E shows a mass fragmentation pattern of peak 2A from FIG. 3B. FIG. 3F shows a mass fragmentation pattern of peak 3A from FIG. 3B. The unlabelled peak is ent-kaurene.

[0065] FIG. 4 is series of graphs depicting GC-MS analysis of hexane extracts from four transgenic P. patens moss gametophyte cultures overexpressing taxadiene synthase and/or taxadiene 5-hydroxylase. All chromatograms (see e.g., FIGS. 4A, 4B, 4C and 4D) are plots of m/z 288 (the molecular weight of oxygenated taxadiene) against retention time. FIG. 4E shows a mass fragmentation pattern of peak 1A from FIG. 4A. FIG. 4F shows a mass fragmentation pattern of peak 2A from FIG. 4B. FIG. 4G shows a mass fragmentation pattern of peak 3A from FIG. 4C. FIG. 4H shows a mass fragmentation pattern of peak 4A from FIG. 4D.

### DETAILED DESCRIPTION OF THE INVENTION

[0066] Described herein are compositions and processes for production of terpenoids from metabolically engineered moss. The present invention is based, at least in part, on the discovery that heterologous overexpression of taxadiene synthase in the moss Physcomitrella patens produced terpenoid compounds, such as taxa-4(5),11(12)-diene, without any substantial deleterious phenotypic consequences.

[0067] Target terpenoids and corresponding sequences for transformation of a moss cell

[0068] According to the approach described herein, a moss host cell can be transformed so as to provide for production or accumulation of a target terpenoid compound. In some embodiments, a target terpenoid compound can be a diterpenoid. In some embodiments, a target terpenoid compound can be a taxoid. A moss host cell can be transformed with a nucleic acid molecule encoding a terpene synthesis enzyme capable of, for example, performing an enzymatic step involved in the metabolism of a target terpenoid. A nucleic acid encoding a terpene synthesis enzyme alone or in any combination can have a substantial effect on the production of the desired terpene compound or in the production of relevant precursors in a transformed moss.

[0069] A moss host cell can be transformed so as to accumulate one or more terpenoid compounds. A target terpenoid compound can be endogenous or heterologous. A genetically modified moss can express increased levels of a terpene synthesis enzyme relative to a wild type in the event that the starting moss endogenously comprises a nucleic acid encoding such terpene synthesis enzyme. A genetically modified moss can cause expressed levels of a terpene synthesis enzyme in the event that the starting moss does not endogenously contain a nucleic acid encoding such terpene synthesis enzyme.

[0070] For example, a moss host cell can be transformed so as to accumulate one or more of taxa-4(5),11(12)-diene; taxa-4(20),11(12)-diene; taxa-3(4),11(12)-diene; verticillene; taxadiene-5-ol; 5(12)-oxa-3(11)-cyclotaxane; taxadien-11-ol; taxadien-18-ol; taxadien-20-ol; 5α-hydroxy-taxa-4(20),11(12)-diene; 5α,13α-dihydroxy-taxa-4(20),11(12)-diene; 5α-acetoxy-taxa-4(20),11(12)-diene; 5α-acetoxy-10β-hydroxy-taxa-4(20),11(12)-diene; 5α-acetoxy-10β,14β-dihydroxy-taxadiene; taxadiene-5α-acetoxy-13β-ol; taxadiene-5α,13α-diol; taxadiene-5α-acetoxy-10β-ol; baccatin III; 10-deacetylbaccatin III; abietadiene; abietic acid; steviol; steviolmonoside; stevioside; rebaudioside A; forskolin; sclareol; kaurenoic acid; a cembranoid; momilactone A; momilactone B; oryzalexins A-F; oryzalexin S; and phytocassanes A-E.

[0071] One nucleic acid encoding a terpene synthesis enzyme or a combination of several nucleic acid encoding terpene synthesis enzymes can be transformed into a moss host cell, whereby the nucleic acid(s) or enzyme(s) can be modified either in their activity or number in the corresponding host cell. A moss host cell can be further genetically manipulated (e.g., in a key position of a target pathway) such that flux of metabolites can be directed through intermediates useful to the engineered nucleic acid(s) encoding a terpene synthesis enzyme(s). A nucleic acid encoding a terpene synthesis enzyme can be isolated from any suitable organism, e.g. prokaryotes or eukaryotes, which comprises an endogenous sequence recited herein.

[0072] A moss host cell can be transformed to express one or more of: taxadiene synthase; taxadiene-5α-hydroxylase; taxadiene-5α-ol-acetyl transferase; taxane-13α-hydroxylase; taxane-10β-hydroxylase; taxoid 14β-hydroxylase; taxoid-9α-hydroxylase; taxoid-2α-hydroxylase; taxoid-7β-hydroxylase; 2α-hydroxytaxane 2-O-benzoyl transferase (i.e., taxoid-2α-O-benzoyl transferase); taxoid C1β-hydroxylase; taxoid C4β, C20-epoxidase; abietadiene synthase; abietadienol/abietadienal oxidase; ent-copalyl diphosphate synthase; ent-Kaurene synthase; ent-Kaurene oxidase; kaurenoic acid 13-hydroxylase; UDP-glycosyltransferase (UGT) converting steviolmonoside to steviolbioside; UGT85C2; UGT74G1; UGT76G1; CBT-ol cyclase; CYP71D16; syn-copalyl diphosphate synthase; syn-pimaradiene synthase; ent-sandaracopimaradiene synthase; syn-stemarene synthase; and ent-cassadiene synthase. Exemplary nucleotide and peptide sequences for such enzymes are provided in Table 1. Designations of terpene synthesis enzymes below refer to GenBank Accession numbers, from which the corresponding sequence for the nucleic acid encoding the terpene synthesis enzyme can be obtained.

TABLE 1
Terpenoid biosynthetic pathway enzymes for transformation of a moss cell

| | GenBank | Nucleotide | Polypeptide |
|---|---|---|---|
| Enzyme | Accession No. | Sequence | sequence |
| taxadiene synthase | U48796 | SEQ ID NO: 1 | SEQ ID NO: 2 |
| | AY007207 | SEQ ID NO: 3 | SEQ ID NO: 4 |
| | AY364469 | SEQ ID NO: 5 | SEQ ID NO: 6 |
| | AY364470 | SEQ ID NO: 7 | SEQ ID NO: 8 |
| | AY365032 | SEQ ID NO: 9 | SEQ ID NO: 10 |
| | DQ305407 | SEQ ID NO: 11 | SEQ ID NO: 12 |
| | AY931015 | SEQ ID NO: 13 | SEQ ID NO: 14 |
| | DQ092389 | SEQ ID NO: 15 | SEQ ID NO: 16 |
| | AY461450 | SEQ ID NO: 17 | SEQ ID NO: 18 |
| taxadiene 5α- | AY289209 | SEQ ID NO: 19 | SEQ ID NO: 20 |
| hydroxylase | AY741375 | SEQ ID NO: 21 | SEQ ID NO: 22 |
| taxadiene-5α-ol- | AY289209 | SEQ ID NO: 23 | SEQ ID NO: 24 |
| acetyl transferase | AY741375 | SEQ ID NO: 25 | SEQ ID NO: 26 |
| | AF190130 | SEQ ID NO: 201 | SEQ ID NO: 202 |
| taxane-13α- | AY056019 | SEQ ID NO: 27 | SEQ ID NO: 28 |
| hydroxylase | AY866412 | SEQ ID NO: 29 | SEQ ID NO: 30 |
| | AY959321 | SEQ ID NO: 31 | SEQ ID NO: 32 |
| taxane-10β- | AF318211 | SEQ ID NO: 33 | SEQ ID NO: 34 |
| hydroxylase | AF545833 | SEQ ID NO: 35 | SEQ ID NO: 36 |
| | AY453403 | SEQ ID NO: 37 | SEQ ID NO: 38 |
| | AY519128 | SEQ ID NO: 39 | SEQ ID NO: 40 |
| taxoid-9α- | | | |
| hydroxylase | | | |
| taxoid-2α- | AY518383 | SEQ ID NO: 41 | SEQ ID NO: 42 |
| hydroxylase | AY789508 | SEQ ID NO: 43 | SEQ ID NO: 44 |
| taxoid-7β- | AY307951 | SEQ ID NO: 45 | SEQ ID NO: 46 |
| hydroxylase | AY374652 | SEQ ID NO: 47 | SEQ ID NO: 48 |
| 2α-hydroxytaxane | AF297618 | SEQ ID NO: 49 | SEQ ID NO: 50 |
| 2-O- | AY675557 | SEQ ID NO: 51 | SEQ ID NO: 52 |
| benzoyltransferase | AY970522 | SEQ ID NO: 53 | SEQ ID NO: 54 |
| | AY972076 | SEQ ID NO: 55 | SEQ ID NO: 56 |
| | AY864799 | SEQ ID NO: 57 | SEQ ID NO: 58 |
| | AY970523 | SEQ ID NO: 59 | SEQ ID NO: 60 |
| taxoid C1β- | | | |
| hydroxylase | | | |
| taxoid C4β, C20- | | | |
| epoxidase | | | |
| abietadiene | U50768 | SEQ ID NO: 61 | SEQ ID NO: 62 |
| synthase | AY473621 | SEQ ID NO: 63 | SEQ ID NO: 64 |
| | AY779541 | SEQ ID NO: 65 | SEQ ID NO: 66 |
| | EU439295 | SEQ ID NO: 67 | SEQ ID NO: 68 |
| Abietadienol/ | AY779537 | SEQ ID NO: 69 | SEQ ID NO: 70 |
| abietadienal | | | |
| oxidase | | | |
| ent-copalyl | U11034 | SEQ ID NO: 71 | SEQ ID NO: 72 |
| diphosphate | AB439590 | SEQ ID NO: 73 | SEQ ID NO: 74 |
| synthase | AB439589 | SEQ ID NO: 75 | SEQ ID NO: 76 |
| | AB439588 | SEQ ID NO: 77 | SEQ ID NO: 78 |
| | XM_002306741 | SEQ ID NO: 79 | SEQ ID NO: 80 |
| | XM_002302074 | SEQ ID NO: 81 | SEQ ID NO: 82 |
| | EU003997 | SEQ ID NO: 83 | SEQ ID NO: 84 |
| | AY242859 | SEQ ID NO: 85 | SEQ ID NO: 86 |
| | AB066271 | SEQ ID NO: 87 | SEQ ID NO: 88 |
| | AB015675 | SEQ ID NO: 89 | SEQ ID NO: 90 |
| | AB169981 | SEQ ID NO: 91 | SEQ ID NO: 92 |
| | AY562491 | SEQ ID NO: 93 | SEQ ID NO: 94 |
| | AY562490 | SEQ ID NO: 95 | SEQ ID NO: 96 |
| | AY602991 | SEQ ID NO: 97 | SEQ ID NO: 98 |
| | AY551435 | SEQ ID NO: 99 | SEQ ID NO: 100 |
| | AB170034 | SEQ ID NO: 101 | SEQ ID NO: 102 |
| | AB109763 | SEQ ID NO: 103 | SEQ ID NO: 104 |
| | AB046689 | SEQ ID NO: 105 | SEQ ID NO: 106 |
| | AB042424 | SEQ ID NO: 107 | SEQ ID NO: 108 |
| | AF049906 | SEQ ID NO: 109 | SEQ ID NO: 110 |
| | AF049905 | SEQ ID NO: 111 | SEQ ID NO: 112 |
| | U63652 | SEQ ID NO: 113 | SEQ ID NO: 114 |
| | AF034545 | SEQ ID NO: 115 | SEQ ID NO: 116 |
| ent-Kaurene | NM_001154587 | SEQ ID NO: 117 | SEQ ID NO: 118 |
| synthase | AY242860 | SEQ ID NO: 119 | SEQ ID NO: 120 |
| | NM_106594 | SEQ ID NO: 121 | SEQ ID NO: 122 |
| | NM_001111787 | SEQ ID NO: 123 | SEQ ID NO: 124 |
| | NM_001111627 | SEQ ID NO: 125 | SEQ ID NO: 126 |
| | E12936 | SEQ ID NO: 127 | SEQ ID NO: 128 |
| | AY347878 | SEQ ID NO: 129 | SEQ ID NO: 130 |
| | AY347877 | SEQ ID NO: 131 | SEQ ID NO: 132 |
| | AB045310 | SEQ ID NO: 133 | SEQ ID NO: 134 |
| | AF097311 | SEQ ID NO: 135 | SEQ ID NO: 136 |
| | AF097310 | SEQ ID NO: 137 | SEQ ID NO: 138 |
| | AF034774 | SEQ ID NO: 139 | SEQ ID NO: 140 |
| | AB003395 | SEQ ID NO: 141 | SEQ ID NO: 142 |
| | U43904 | SEQ ID NO: 143 | SEQ ID NO: 144 |
| ent-Kaurene | NM_122491 | SEQ ID NO: 145 | SEQ ID NO: 146 |
| oxidase | DQ200952 | SEQ ID NO: 147 | SEQ ID NO: 148 |
| | AY995178 | SEQ ID NO: 149 | SEQ ID NO: 150 |
| | AY364317 | SEQ ID NO: 151 | SEQ ID NO: 152 |
| | AY660666 | SEQ ID NO: 153 | SEQ ID NO: 154 |
| | AY660665 | SEQ ID NO: 155 | SEQ ID NO: 156 |
| | AY660664 | SEQ ID NO: 157 | SEQ ID NO: 158 |
| | AY579214 | SEQ ID NO: 159 | SEQ ID NO: 160 |
| | AY462247 | SEQ ID NO: 161 | SEQ ID NO: 162 |
| | AY563549 | SEQ ID NO: 163 | SEQ ID NO: 164 |
| | AY245442 | SEQ ID NO: 165 | SEQ ID NO: 166 |
| | AF212990 | SEQ ID NO: 167 | SEQ ID NO: 168 |
| | AF047721 | SEQ ID NO: 169 | SEQ ID NO: 170 |
| | AF047720 | SEQ ID NO: 171 | SEQ ID NO: 172 |
| | AF047719 | SEQ ID NO: 173 | SEQ ID NO: 174 |
| Kaurenoic acid 13- | Reg No | SEQ ID NO: 175 | SEQ ID NO: 176 |
| hydroxylase | 181186-97-0 | | |
| UDP- | AY345978 | SEQ ID NO: 177 | SEQ ID NO: 178 |
| glycosyltransferase | | | |
| UGT85C2 | | | |
| UGT74G1 | AY345982 | SEQ ID NO: 179 | SEQ ID NO: 180 |
| UGT76G1 | AY345974 | SEQ ID NO: 181 | SEQ ID NO: 182 |
| CBT-ol cyclase | AY049090 | SEQ ID NO: 183 | SEQ ID NO: 184 |
| | AF401234 | SEQ ID NO: 185 | SEQ ID NO: 186 |
| CYP71D16 | AF166332 | SEQ ID NO: 187 | SEQ ID NO: 188 |
| syn-copalyl | AB066270 | SEQ ID NO: 189 | SEQ ID NO: 190 |
| diphosphate | | | |
| synthase | | | |
| syn-pimaradiene | AY616862 | SEQ ID NO: 191 | SEQ ID NO: 192 |
| synthase | AB126934 | SEQ ID NO: 193 | SEQ ID NO: 194 |
| ent- | DQ823355 | SEQ ID NO: 195 | SEQ ID NO: 196 |
| sandaracopimaradiene | | | |
| synthase | | | |
| syn-stemarene | AB118056 | SEQ ID NO: 197 | SEQ ID NO: 198 |
| synthase | | | |
| ent-cassadiene | DQ823354 | SEQ ID NO: 199 | SEQ ID NO: 200 |
| synthase | | | |

[0073] A moss host cell can be transformed with a heterologous nucleotide sequence recited in Table 1, or with a nucleotide sequence having at least about 90% sequence identity to a heterologous nucleotide sequence recited in Table 1 that encodes a polypeptide having a specified enzymatic activity, or a complementary sequence to any of these sequences. For example, a moss host cell can be transformed with a nucleotide sequence having at least about 91%, at least about 92%, at least about 93%, at least about 94%, at least about 95%, at least about 96%, at least about 97%, at least about 98%, or at least about 99% sequence identity to a heterologous nucleotide sequence recited in Table 1 that encodes a polypeptide having a specified enzymatic activity corresponding to that heterologous nucleotide sequence.

[0074] A moss host cell can be transformed with a heterologous nucleotide sequence encoding a polypeptide sequence recited in Table 1, or encoding a polypeptide sequence having at least about 90% sequence identity to a polypeptide sequence recited in Table 1 having a specified enzymatic activity, or a complementary sequence to any of these sequences. For example, a moss host cell can be transformed with a heterologous nucleotide sequence encoding a polypeptide sequence having at least about 91%, at least about 92%, at least about 93%, at least about 94%, at least about 95%, at least about 96%, at least about 97%, at least about 98%, or at least about 99% sequence identity to a polypeptide sequence recited in Table 1 that retains a corresponding enzymatic activity.

[0075] A moss host cell can be transformed with an isolated polynucleotide that hybridizes to any of the above discussed nucleic acid sequences under stringent conditions thereto over the entire length of said sequence; said stringent conditions comprising incubation at 65° C. in a solution comprising 6×SSC (0.9 M sodium chloride and 0.09 M sodium citrate); and which encodes a polypeptide having a specified enzymatic activity corresponding to the above discussed nucleic acid sequence.

[0076] A terpenoid compound synthesized in a moss host cell can be accumulated, converted to another terpenoid compound, or both. Generally, a terpenoid compound will have greater levels of accumulation where no additional terpenoid biosynthetic enzyme with specificity for that terpenoid compound has been engineered into the moss host cell. In some embodiments, a terpenoid compound produced from a first heterologous enzyme will accumulate in the moss cell. In some embodiments, a terpenoid compound produced from a first heterologous enzyme, where the host cell has at least a second heterologous enzyme expressing a second terpenoid biosynthetic enzyme with at least some specificity for the terpenoid compound, will accumulate in the moss cell. In some embodiments, a terpenoid compound produced from a first heterologous enzyme, where the host cell has at least a second heterologous enzyme expressing a second terpenoid biosynthetic enzyme with at least some specificity for the terpenoid compound, will be produced in the moss cell but will not substantially accumulate in the moss cell.

[0077] To produce taxa-4(5),11(12)-diene, a precursor of the anticancer drug paclitaxel, a moss host cell can be engineered to express taxadiene synthase. As shown herein, overexpression of taxadiene synthase (from Taxus brevifolia) in P. patens can result in production or accumulation of taxa-4(5),11(12)-diene (see Example 1).

[0078] To produce a taxadien-ol, a moss host cell can be engineered to express taxadiene synthase and one or more hydroxylases. As shown herein, overexpression of taxadiene synthase and taxadiene 5-hydroxylase in P. patens can result in production or accumulation of a taxadien-ol (see Examples 2-3). For example, accumulated taxadien-ol can include one or more of taxadiene-5-ol, taxadien-11-ol, taxadien-18-ol, and taxadien-20-ol. For example, a moss host cell can be engineered to express taxadiene synthase and a one or more hydroxylases selected from taxadiene 5-hydroxylase; taxane-13α-hydroxylase; taxane-10β-hydroxylase; taxoid 14β-hydroxylase; taxoid-9α-hydroxylase; taxoid-2α-hydroxylase; taxoid-7β-hydroxylase; taxoid C1β-hydroxylase. In some embodiments, a moss host cell can be engineered to express taxadiene synthase and taxadiene 5-hydroxylase along with one or more additional hydroxylases, such as taxane-13α-hydroxylase; taxane-10β-hydroxylase; taxoid 14β-hydroxylase; taxoid-9α-hydroxylase; taxoid-2α-hydroxylase; taxoid-7β-hydroxylase; and taxoid C1β-hydroxylase. In some of these embodiments, the most host cell can accumulate, for example, 5α-acetoxy-taxadiene; 5α-acetoxy-10β-hydroxy-taxadiene; 5α-acetoxy-10β,14β-dihydroxy-taxadiene; or 5α,13α-dihydroxy-taxadiene.

[0079] In some embodiments, a moss host cell described above is further engineered to express additional taxoid biosynthetic enzymes. For example, a moss host cell can be engineered to express taxadiene synthase, one or more hydroxylases, and one or more transferases. In some embodiments, a moss host cell is can be engineered to express taxadiene synthase, a hydroxylase (e.g., taxadiene 5-hydroxylase), and an acetyl transferase (e.g., taxadiene-5α-ol-acetyl transferase).

[0080] To produce taxadiene-5-ol, a moss host cell can be engineered to express taxadiene synthase and taxadiene 5α-hydroxylase. As shown herein, overexpression of taxadiene synthase and taxadiene 5-hydroxylase in P. patens can result in production or accumulation of taxadiene and taxadiene-5-ol (see Example 2).

[0081] To produce taxadien-11-ol, a moss host cell can be engineered to express taxadiene synthase and taxadiene 5α-hydroxylase. As shown herein, overexpression of taxadiene synthase and taxadiene 5-hydroxylase in P. patens can result in production or accumulation of taxadien-11-ol (see Example 3).

[0082] To produce taxadien-18-ol, a moss host cell can be engineered to express taxadiene synthase and taxadiene 5α-hydroxylase. As shown herein, overexpression of taxadiene synthase and taxadiene 5-hydroxylase in P. patens can result in production or accumulation of taxadien-18-ol (see Example 3).

[0083] To produce taxadien-20-ol, a moss host cell can be engineered to express taxadiene synthase and taxadiene 5α-hydroxylase. As shown herein, overexpression of taxadiene synthase and taxadiene 5-hydroxylase in P. patens can result in production or accumulation of taxadien-20-ol (see Example 3).

[0084] To produce 5(12)-oxa-3(11)-cyclotaxane, a moss host cell can be engineered to express taxadiene synthase and taxadiene 5α-hydroxylase. As shown herein, overexpression of taxadiene synthase and taxadiene 5-hydroxylase in P. patens can result in production or accumulation of 5(12)-oxa-3(11)-cyclotaxane (see Example 3).

[0085] To produce taxadiene-5α-acetoxy-13β-ol, a moss host cell can be engineered to express taxadiene synthase; taxadiene-5α-hydroxylase; taxadiene-5α-ol-acetyl transferase; and taxane-13α-hydroxylase.

[0086] To produce taxadiene-5α,13α-diol, a moss host cell can be engineered to express taxadiene synthase; taxadiene-5α-hydroxylase; and taxane-13α-hydroxylase.

[0087] To produce taxadiene-5α-acetoxy-10β-ol, a moss host cell can be engineered to express taxadiene synthase; taxadiene-5α-hydroxylase; taxadiene-5α-ol-acetyl transferase; and taxane-10β-hydroxylase.

[0088] To produce 10-deacetylbaccatin III, a moss host cell can be engineered to express taxadiene synthase; taxadiene-5α-hydroxylase; taxadiene-5α-ol-acetyl transferase; taxane-10β-hydroxylase; taxane-13α-hydroxylase; taxoid-9α-hydroxylase; taxoid-2α-hydroxylase; taxoid-7β-hydroxylase; 2α-hydroxytaxane 2-O-benzoyltransferase (i.e., taxoid-2α-O-benzoyl transferase); taxoid C1β-hydroxylase; and taxoid C4β, C20-epoxidase.

[0089] To produce abietadiene, a moss host cell can be engineered to express abietadiene synthase.

[0090] To produce abietic acid, a moss host cell can be engineered to express abietadiene synthase and abietadienol/abietadienal oxidase.

[0091] To produce steviol, a moss host cell can be engineered to express ent-copalyl diphosphate synthase; ent-Kaurene synthase; ent-Kaurene oxidase; and kaurenoic acid 13-hydroxylase.

[0092] To produce steviolmonoside, a moss host cell can be engineered to express ent-copalyl diphosphate synthase; ent-Kaurene synthase; ent-Kaurene oxidase; kaurenoic acid 13-hydroxylase; and UDP-glycosyltransferase (UGT) UGT85C2 converting steviolmonoside to steviolbioside.

[0093] To produce stevioside, a moss host cell can be engineered to express ent-copalyl diphosphate synthase; ent-Kaurene synthase; ent-Kaurene oxidase; kaurenoic acid 13-hydroxylase; UDP-glycosyltransferase (UGT) UGT85C2 converting steviolmonoside to steviolbioside; and UGT74G1.

[0094] To produce rebaudioside A, a moss host cell can be engineered to express ent-Copalyl diphosphate synthase; ent-Kaurene synthase; ent-Kaurene oxidase; kaurenoic acid 13-hydroxylase; UDP-glycosyltransferase (UGT) UGT85C2 converting steviolmonoside to steviolbioside; UGT74G1; and UGT76G1.

[0095] To produce kaurenoic acid, a moss host cell can be engineered to express ent-Copalyl diphosphate synthase; ent-Kaurene synthase; and ent-Kaurene oxidase.

[0096] To produce cembranoids, a moss host cell can be engineered to express CBT-ol cyclase and CYP71D16.

[0097] To produce momilactones A and B, a moss host cell can be engineered to express syn-copalyl diphosphate synthase and syn-pimaradiene synthase.

[0098] To produce oryzalexins A-F, a moss host cell can be engineered to express ent-Copalyl diphosphate synthase and ent-sandaracopimaradiene synthase.

[0099] To produce oryzalexin S, a moss host cell can be engineered to express syn-copalyl diphosphate synthase and syn-stemarene synthase.

[0100] To produce phytocassanes A-E, a moss host cell can be engineered to express ent-Copalyl diphosphate synthase and ent-cassadiene synthase.

[0101] Down-Regulated Endogenous Moss Genes

[0102] A moss host cell can be transformed so as to reduce an endogenous terpenoid compound. Reduction of an endogenous terpenoid compound can increase precursor availability for engineered pathways associated with production of a target terpenoid. Reduction of an endogenous terpenoid compound can increase production or accumulation of a target terpenoid compound in a moss host cell.

[0103] A moss host cell can be transformed so as to reduce or eliminate one or more of Mevalonate diphosphate decarboxylase; Mevalonate kinase; HMG-CoA reductase; Squalene epoxidase; 4-Hydroxyphenylpyruvate dioxygenase; Geranylgeranyl pyrophosphate synthase; ent-Kaurene synthetase; Chorismate mutase; Farnesyl pyrophosphate synthase; Phytoene synthase; Adenylate isopentenyltransferase; Squalene-hopene-cyclase; γ-Tocopherol methyltransferase; Geranylgeranyl reductase; Phytoene desaturase; ζ-Carotene desaturase; Geranylgeranyltransferase I; Zeaxanthin epoxidase; Copalyl diphosphate synthase; 2-Heptaprenyl-1,4-naphthoquinone methyltransferase; 9-cis-Epoxycarotenoid cleavage dioxygenase; 1-Deoxy-D-xylulose 5-phosphate synthase; Lycopene ε cyclase; and 2-Methyl-6-phytylhydroquinone 3-methyltransferase.

[0104] For example, moss genes encoding proteins involved in the synthesis of tocopherols and carotenoids, along with antisense nucleic acid molecules specific thereto, are described in US App Pub No. 2003/0157592. Expression of such endogenous gene targets can be reduced or eliminated, for example by the recited antisense molecules, so as to increase precursor availability or increase production or accumulation of a target terpenoid compound in a moss host cell.

[0105] P. patens has been reported to produce two diterpenoids (ent-kaurene and 16-hydroxykaurane) as secondary metabolites (von Schwartzenberg et al. 2004), which together can comprise up to 0.2% of its fresh weight (based on GC-MS analysis). As shown herein, P. patens overexpressing taxadiene synthase or taxadiene synthase and taxadiene 5-hydroxylase continue to produce ent-kaurene and 16-hydroxykaurane as a major portion of the diterpenoid pool (see e.g., FIG. 1; Examples 1-2). Because P. patens produces high levels (up to 0.2% fresh weight) of ent-kaurene and 16-hydroxykaurane, the amounts of a target terpenoid compound can be increased by inhibiting formation of ent-kaurene or 16-hydroxykaurane.

[0106] Terpenoid production in a transgenic moss overexpressing a heterologous terpene synthesis gene can produce elevated levels of a target terpenoid by eliminating or reducing an endogenous terpene synthesis gene(s), such as ent-kaurene or 16-hydroxykaurane formation. For example, knocking out the moss bifunctional diterpene synthase gene can reduce or eliminate levels of endogenous ent-kaurene or 16-hydroxykaurane. In some embodiments, diterpene synthase activity can be reduced or eliminated to increase production or accumulation of other target terpenoids. Knocking out the moss kaurene synthase gene can reduce or eliminate levels of endogenous ent-kaurene or 16-hydroxykaurane. In some embodiments, kaurene synthase activity can be reduced or eliminated to increase production or accumulation of other target terpenoids. Knocking out moss terpenoid synthesis genes can be accomplished by, for example, homologous recombination or RNAi (see e.g., Schaefer 2002 Annu Rev Plant Biol. 53, 477-501; Bezanilla et al. 2003 Plant Physiol. 133(2), 470-4).

[0107] Promoters

[0108] A terpene synthesis gene can be operably linked to a promoter for transformation of a plant cell. The promoter can be any promoter functional in a moss cell (see e.g., Weise et al. Applied Microbiology and Biotechnology 70(3), 337-345; Saidi et al. 2005 Plant Molecular Biology 59(5), 697-711; Horstmann et al. 2004 BMC Biotechnology 4; Holtorf et al. 2002 Plant Cell Reports 21(4), 341-346; Zeidler et al. 1996 Plant Molecular Biology 30(1), 199-205). The promoter can be an inducible promoter.

[0109] Examples of promoters than can be used in accord with methods and compositions described herein include, but are not limited to, ubiquitin promoter (see e.g., Example 1); factor EF1α gene promoter (US App Pub No. 2008/0313776); rice tungro bacilliform virus (RTBV) gene promoter (US App Pub No. 2008/0282431); cestrum yellow leaf curling virus (CmYLCV) promoter (Stavolone et al. Plant Molecular Biology 53(5), 663-673); tCUP cryptic promoter system (Malik et al. 2002 Theoretical and Applied Genetics 105(4), 505-514); T6P-3 promoter (JP2002238564); S-adenosyl-L-methionine synthetase promoter (WO/2000/037662); Raspberry E4 gene promoter (U.S. Pat. No 6,054,635); cauliflower mosaic virus 35S promoter (Benfey et al. 1990 Science 250(4983), 959-966); figwort mosaic virus promoter (U.S. Pat. No. 5,378,619); conditional heat-shock promoter (Saidi et al. 2005 Plant Molecular Biology 59(5), 697-711); promoter subfragments of the sugar beet V-type H+-ATPase subunit c isoform (Holtorf et al. 2002 Plant Cell Reports 21(4), 341-346); beta-tubulin promoter (Jost et al. 2005 Current Genetics 47(2), 111-120); and bacterial quorum-sensing components (You et al. 2006 Plant Physiology 140 (4), 1205-1212).

[0110] Moss Host Cells

[0111] Overexpression of a terpene synthesis gene in a moss can avoid problems in post-translational modification of heterologously expressed plant enzymes and formation of multi-enzyme complexes because it is a plant cell. Yeasts and bacteria do not have the same post-translational modification mechanisms as plants, which may be required by plant enzymes for optimal activity. As such, yeast and bacteria host cells may not properly utilize metabolons (i.e., multienzyme complexes) for coupling consecutive steps in a pathway, which could explain why individual expression of taxadiene synthase (Huang et al. 2001), taxadiene-5α-hydroxylase (Hefner et al. 1996), taxadiene-5α-ol acetyltransferase (Walker et al. 2000), taxane 10β-hydroxylase (Schoendorf et al. 2001), and taxane 13α-hydroxylase (Jennewein et al. 2001) in yeast or bacteria resulted in active enzymes, yet simultaneous expression of these genes in yeast did not result in the production of the expected downstream products, except for taxadiene 5α-ol (DeJong et al. 2006).

[0112] Overexpression of a terpene synthesis gene in a moss can avoid problems of stunted growth phenotype observed with overexpression of such genes in higher plants. As demonstrated herein, there were no phenotypic differences observed between transgenic P. patens and the wild type (see e.g., Examples 1-2). In contrast, both arabidopsis and tomato had reduced growth when they overexpressed taxadiene synthase (Besumbes et al. 2004; Kovacs et al. 2007). Presumably, the introduced taxadiene pathway in arabidopsis and tomato interfered with endogenous gibberellin biosynthesis (Besumbes et al. 2004), which used the same precursor (geranylgeranyl diphosphate) as taxa-4(5),11(12)-diene. Mosses do not require gibberellins for growth (Yasumura et al. 2007; Hirano et al. 2007; Vandenbussche et al. 2007), which may account for why growth was not inhibited in transgenic P. patens.

[0113] In some embodiments, the moss host belongs to the genus Physcomitrella or Ceratodon. In one embodiment, the moss host belongs to the genus Physcomitrella. An example of a Physcomitrella moss that can be transformed to accumulate a terpenoid includes, but is not limited to, Physcomitrella patens. An example of a Ceratodon moss that can be transformed to accumulate a terpenoid includes, but is not limited to, Ceratodon purpureus.

[0114] Moss host cells can be transformed according to molecular methods understood in the art, as discussed further below. For example, moss transformation protocols are described in Nogue et al. 2007 Research & Reviews in BioSciences 1(1), 27-34; Weise et al. Applied Microbiology and Biotechnology 70(3), 337-345; Saidi et al. 2005 Plant Molecular Biology 59(5), 697-711; and US App Pub No. 2003/0157592.

[0115] Processes for culture of moss are known in the art (see e.g., Decker and Reski 2008; Knight et al. 2002 Molecular Plant Biology 2, 285-301; Cove et al. 2009 Emerging Model Organisms: A Laboratory Manual, Vol. 1. CSHL Press, Cold Spring Harbor, N.Y., USA, 2009). Except as otherwise noted herein, therefore, the culturing of a transgenic moss described herein can be carried out in accordance with such processes.

[0116] Molecular Engineering

[0117] Host cells can be transformed using a variety of standard techniques known to the art (see, e.g., Sambrook and Russel (2006) Condensed Protocols from Molecular Cloning: A Laboratory Manual, Cold Spring Harbor Laboratory Press, ISBN-10: 0879697717; Gilmartin and Bowler (2002) Molecular Plant Biology Volume 1, Oxford University Press, ISBN-10: 0199638756; Ausubel et al. (2002) Short Protocols in Molecular Biology, 5th ed., Current Protocols, ISBN-10: 0471250929; Sambrook and Russel (2001) Molecular Cloning: A Laboratory Manual, 3d ed., Cold Spring Harbor Laboratory Press, ISBN-10: 0879695773; Elhai, J. and Wolk, C. P. 1988. Methods in Enzymology 167, 747-754). Such techniques include, but are not limited to, viral infection, calcium phosphate transfection, liposome-mediated transfection, microprojectile-mediated delivery, receptor-mediated uptake, cell fusion, electroporation, Agrobacterium-mediated transformation, direct DNA uptake by protoplasts, and the like. The transfected cells can be selected and propagated to provide recombinant host cells that comprise the expression vector stably integrated in the host cell genome.

[0118] For example, moss transformation protocols are described in Nogue et al. 2007 Research & Reviews in BioSciences 1(1), 27-34; Weise et al. Applied Microbiology and Biotechnology 70(3), 337-345; Saidi et al. 2005 Plant Molecular Biology 59(5), 697-711; and US App Pub No. 2003/0157592.

[0119] Host strains developed according to the approaches described herein can be evaluated by a number of means known in the art (see e.g., Studier (2005) Protein Expr Purif. 41(1), 207-234; Gellissen, ed. (2005) Production of Recombinant Proteins: Novel Microbial and Eukaryotic Expression Systems, Wiley-VCH, ISBN-10: 3527310363; Baneyx (2004) Protein Expression Technologies, Taylor & Francis, ISBN-10: 0954523253).

[0120] Exemplary nucleic acids which may be introduced to a moss host cell include, for example, DNA sequences or genes from another species, or even genes or sequences which originate with or are present in the same species, but are incorporated into recipient cells by genetic engineering methods. The term “exogenous” is also intended to refer to genes that are not normally present in the cell being transformed, or perhaps simply not present in the form, structure, etc., as found in the transforming DNA segment or gene, or genes which are normally present and that one desires to express in a manner that differs from the natural expression pattern, e.g., to over-express. Thus, the term “exogenous” gene or DNA is intended to refer to any gene or DNA segment that is introduced into a recipient cell, regardless of whether a similar gene may already be present in such a cell. The type of DNA included in the exogenous DNA can include DNA which is already present in the plant cell, DNA from another plant, DNA from a different organism, or a DNA generated externally, such as a DNA sequence containing an antisense message of a gene, or a DNA sequence encoding a synthetic or modified version of a gene.

[0121] Design, generation, and testing of the variant nucleotides, and their encoded polypeptides, having the above required percent identities and retaining a required activity of the expressed protein is within the skill of the art. For example, directed evolution and rapid isolation of mutants can be according to methods described in references including, but not limited to, Link et al. (2007) Nature Reviews 5(9), 680-688; Sanger et al. (1991) Gene 97(1), 119-123; Ghadessy et al. (2001) Proc Natl Acad Sci USA 98(8) 4552-4557. Thus, one skilled in the art could generate a large number of nucleotide and/or polypeptide variants having, for example, at least 95-99% identity to the reference sequence described herein and screen such for desired phenotypes according to methods routine in the art. Generally, conservative substitutions can be made at any position so long as the required activity is retained. So-called conservative exchanges can be carried out in which the amino acid which is replaced has a similar property as the original amino acid, for example the exchange of Glu by Asp, Gln by Asn, Val by Ile, Leu by Ile, and Ser by Thr. Deletion is the replacement of an amino acid by a direct bond. Positions for deletions include the termini of a polypeptide and linkages between individual protein domains. Insertions are introductions of amino acids into the polypeptide chain, a direct bond formally being replaced by one or more amino acids. Amino acid sequence can be modulated with the help of art-known computer simulation programs that can produce a polypeptide with, for example, improved activity or altered regulation. On the basis of this artificially generated polypeptide sequences, a corresponding nucleic acid molecule coding for such a modulated polypeptide can be synthesized in-vitro using the specific codon-usage of the desired host cell, e.g. mosses (back-translated nucleic acid sequences).

[0122] Nucleotide and/or amino acid sequence identity percent (%) is understood as the percentage of nucleotide or amino acid residues that are identical with nucleotide or amino acid residues in a candidate sequence in comparison to a reference sequence when the two sequences are aligned. To determine percent identity, sequences are aligned and if necessary, gaps are introduced to achieve the maximum percent sequence identity. Sequence alignment procedures to determine percent identity are well known to those of skill in the art. Often publicly available computer software such as BLAST, BLAST2, ALIGN2 or Megalign (DNASTAR) software is used to align sequences. Those skilled in the art can determine appropriate parameters for measuring alignment, including any algorithms needed to achieve maximal alignment over the full-length of the sequences being compared. When sequences are aligned, the percent sequence identity of a given sequence A to, with, or against a given sequence B (which can alternatively be phrased as a given sequence A that has or comprises a certain percent sequence identity to, with, or against a given sequence B) can be calculated as: percent sequence identity=X/Y100, where X is the number of residues scored as identical matches by the sequence alignment program's or algorithm's alignment of A and B and Y is the total number of residues in B. If the length of sequence A is not equal to the length of sequence B, the percent sequence identity of A to B will not equal the percent sequence identity of B to A.

[0123] “Highly stringent hybridization conditions” are defined as hybridization at 65° C. in a 6×SSC buffer (i.e., 0.9 M sodium chloride and 0.09 M sodium citrate). Given these conditions, a determination can be made as to whether a given set of sequences will hybridize by calculating the melting temperature (Tₘ) of a DNA duplex between the two sequences. If a particular duplex has a melting temperature lower than 65° C. in the salt conditions of a 6×SSC, then the two sequences will not hybridize. On the other hand, if the melting temperature is above 65° C. in the same salt conditions, then the sequences will hybridize. In general, the melting temperature for any hybridized DNA:DNA sequence can be determined using the following formula: Tₘ=81.5° C.+16.6(log₁₀[Na⁺])+0.41(fraction G/C content)−0.63(% formamide)−(600/l). Furthermore, the Tₘ of a DNA:DNA hybrid is decreased by 1-1.5° C. for every 1% decrease in nucleotide identity (see e.g., Sambrook and Russel, 2006).

[0124] Method

[0125] Another aspect provides a method for producing a target terpenoid. Such method can involve either the culturing of a transformed moss cell, tissue, organ, or culturing a whole moss described herein, such that a target terpenoid is produced. The method can involve transforming a moss host cell as described above. The method can include the step of recovering the target terpenoid from the cultured moss. Suitable protocols for identifying, isolating, or purifying a target terpenoid from the cultured moss are generally understood in the art.

[0126] In some embodiments, methods described herein include induction of taxoid synthesis exposure or contact of the transgenic moss (e.g., cell, tissue, organ, or whole moss) with an agent that stimulates synthesis of one or more target compounds. For example, a transgenic moss as described herein can be contacted or exposed to methyl jasmonate so as to induce taxoid production.

[0127] In some embodiments, the numbers expressing quantities of ingredients, properties such as molecular weight, reaction conditions, and so forth, used to describe and claim certain embodiments of the invention are to be understood as being modified in some instances by the term “about.” Accordingly, in some embodiments, the numerical parameters set forth in the written description and attached claims are approximations that can vary depending upon the desired properties sought to be obtained by a particular embodiment. In some embodiments, the numerical parameters should be construed in light of the number of reported significant digits and by applying ordinary rounding techniques. Notwithstanding that the numerical ranges and parameters setting forth the broad scope of some embodiments of the invention are approximations, the numerical values set forth in the specific examples are reported as precisely as practicable. The numerical values presented in some embodiments of the invention may contain certain errors necessarily resulting from the standard deviation found in their respective testing measurements.

[0128] In some embodiments, the terms “a” and “an” and “the” and similar references used in the context of describing a particular embodiment of the invention (especially in the context of certain of the following claims) can be construed to cover both the singular and the plural. The recitation of ranges of values herein is merely intended to serve as a shorthand method of referring individually to each separate value falling within the range. Unless otherwise indicated herein, each individual value is incorporated into the specification as if it were individually recited herein. All methods described herein can be performed in any suitable order unless otherwise indicated herein or otherwise clearly contradicted by context. The use of any and all examples, or exemplary language (e.g. “such as”) provided with respect to certain embodiments herein is intended merely to better illuminate the invention and does not pose a limitation on the scope of the invention otherwise claimed. No language in the specification should be construed as indicating any non-claimed element essential to the practice of the invention.

[0129] Groupings of alternative elements or embodiments of the invention disclosed herein are not to be construed as limitations. Each group member can be referred to and claimed individually or in any combination with other members of the group or other elements found herein. One or more members of a group can be included in, or deleted from, a group for reasons of convenience or patentability. When any such inclusion or deletion occurs, the specification is herein deemed to contain the group as modified thus fulfilling the written description of all Markush groups used in the appended claims.

[0130] All publications, patents, patent applications, and other references cited in this application are incorporated herein by reference in their entirety for all purposes to the same extent as if each individual publication, patent, patent application or other reference was specifically and individually indicated to be incorporated by reference in its entirety for all purposes. Citation of a reference herein shall not be construed as an admission that such is prior art to the present invention.

[0131] Having described the invention in detail, it will be apparent that modifications, variations, and equivalent embodiments are possible without departing the scope of the invention defined in the appended claims.

[0132] Furthermore, it should be appreciated that all examples in the present disclosure are provided as non-limiting examples.

### Examples

[0133] The following non-limiting examples are provided to further illustrate the present invention. It should be appreciated by those of skill in the art that the techniques disclosed in the examples that follow represent approaches the inventors have found to function well in the practice of the invention, and thus can be considered to constitute examples of modes for its practice. However, those of skill in the art should, in light of the present disclosure, appreciate that many changes can be made in the specific embodiments that are disclosed and still obtain a like or similar result without departing from the spirit and scope of the invention.

### Example 1

[0134] This example describes transformation of Physcomitrella patens with heterologous taxadiene synthase resulting in production or accumulation of taxadiene in the cultured transformed moss.

[0135] The coding region of taxadiene synthase from Taxus brevifolia was amplified by PCR using oligonucleotides 5′-CACCATGGCTCAGCTCTCATTTAAT-3′ (SEQ ID NO: 203) and 5′-TCATACTTGAATTGGATCAATATAAACTTT-3′ (SEQ ID NO: 204) as primers, and taxadiene synthase cDNA (SEQ ID NO: 1) as template. The amplified product (about 2.6 kb) was gel purified and cloned into a pENTR vector (Invitrogen) via a Topoisomerase-mediated ligation reaction, and then subcloned into an expression vector (pTHUBlgateway, SEQ ID NO: 213, constructed from pGEMT-easy of Promega) via a Gateway LR reaction using LR clonase II, to generate the plasmid pTHUBI:TS. This plasmid placed taxadiene synthase under the control of a ubiquitin promoter.

[0136] After verification of the inserted taxadiene synthase gene in pTHUBI:TS by DNA sequencing, pTHUBI:TS was linearized using the restriction enzyme SwaI and then transformed into Physcomitrella patens (Gransden strain) protoplasts using standard polyethylene glycol-mediated transformation procedure (Schaefer and Zryd 1997). Hygromycin resistant P. patens transformants were isolated and grown according to Perroud and Quatrano (2006). After screening transformants for targeted gene insertions by PCR, two transgenic lines (TS3 and TS9) showed the presence of the transgene at the targeted locus. Southern blot analysis performed independently with hygromycin and taxadiene synthase probes confirmed the presence of multicopy insertion of the vector in both lines. Presence of taxadiene synthase protein (about 75 kDa) (see SEQ ID NO: 2) was verified by western blot (data not shown) using rabbit polyclonal antibody raised against taxadiene synthase. TS3 and TS9 lines were then further analyzed, along with a wild type control, for the presence of taxa-4(5),11(12)-diene, as described below.

[0137] Hexane (1 ml) was added to about 100 mg (fresh wt) transgenic or wild type P. patens tissues, which were then homogenized in the presence of 1 g Zirconia beads (Fisher) by shaking on a FastPrep instrument (setting 6.0, 3 9 20 s). After centrifugation at 16,000 g for 2 min, the hexane supernatant (0.5 ml) was transferred into a glass vial, from which 5 μl was injected (in splitless mode) by a Varian CP-8410 autoinjector into a FactorFour™ 5 ms capillary column that was installed on a Varian 3900 gas chromatograph connected to a Saturn 2100T ion trap mass spectrometer. Using a temperature program that runs from 50° C. (initially held for 1 min) to 250° C. at a rate of 20° C. per minute, a unique peak at 11.75 min (see e.g., Peak 1, FIG. 1B) was observed in extracts from both TS3 (data not shown) and TS9 (see e.g., FIG. 1B). The mass fragmentation pattern of this peak (see e.g., FIG. 1C) had the same diagnostic ions (m/z 107, 121, 122, 123, 229, 257 and 272) as that reported for taxa-4(5),11(12)-diene (Wildung and Croteau 1996). The amounts of ent-kaurene (see e.g., Peak 2, FIG. 1B) and 16-hydroxykaurane (see e.g., Peak 3, FIG. 1B) in the samples have been quantified by comparison of peak areas with authentic standards.

[0138] In the absence of taxa-4(5),11(12)-diene standard, an identical retention time could not be verified for this peak with taxa-4(5),11(12)-diene. Nevertheless, the presence of a taxadiene synthase gene and protein in the transgenic moss (confirmed by Southern and western blots, respectively) and the de novo formation of a compound with the same fragmentation pattern as taxa-4(5),11(12)-diene in transgenic mosses (but not in the wild type) (see e.g., FIG. 1A) constitute sufficient evidence to suggest that P. patens has for the first time been metabolically engineered to produce taxa-4(5),11(12)-diene. Using nonadecane as an internal standard, it was estimated that taxa-4(5),11(12)-diene could be produced by P. patens up to 0.05% of its fresh weight (maximum value among 12 independent extractions of TS3 and TS9).

[0139] GC-MS analysis of hexane extracts from transgenic Physcomitrella patens overexpressing taxadiene synthase showed a new peak found in transgenic moss but not in wild type (see e.g., peak 1 in FIG. 1B). The mass spectral fragmentation pattern of peak 1 (see e.g., FIG. 1C) matches that of taxa-4(5),11(12)-diene. Peaks 2 and 3 have been identified as ent-kaurene and 16-hydroxykaurane, respectively, by comparison of their retention times and mass spectra with authentic chemical standards (data not shown).

[0140] Results showed that, in stable moss transformants, taxa-4(5),11(12)-diene was produced up to 0.05% fresh weight of tissue, without significantly affecting the amounts of the endogenous diterpenoids (ent-kaurene and 16-hydroxykaurane). Unlike higher plants that had been genetically modified to produce taxa-4(5),11(12)-diene, transgenic P. patens did not exhibit growth inhibition due to alteration of diterpenoid metabolic pools.

[0141] Results also demonstrated there were no phenotypic differences observed between transgenic P. patens and the wild type when examined under 10× to 40× magnification (data not shown).

### Example 2

[0142] This example describes transformation of Physcomitrella patens with heterologous taxadiene synthase and taxadiene 5-hydroxylase, resulting in production or accumulation of taxadiene and taxadiene-5-ol in the cultured transformed moss.

[0143] Methods are as described in Example 1, unless otherwise indicated. Taxadiene synthase was overexpressed under the control of a ubiquitin promoter. Taxadiene 5-hydroxylase was overexpressed under the control of a 35S promoter.

[0144] The gene taxadiene-5α-hydroxylase (T5H) (SEQ ID NO: 19) was amplified by PCR, cloned into pENTR, and then the pENTR/T5H was transformed into TOP10 E. coli. The pENTR/T5H plasmid was equipped with an antibiotic marker (ampicillin), which was used for screening analysis. Once a suitable colony was identified, it was grown overnight. At this point, the bacteria were concentrated by centrifugation and the plasmid recovered. The T5H gene was then identified using gel electrophoresis and PCR analysis. From here, the T5H gene was transferred to a destination vector pTZ35Sgateway, using the Gateway system, and the resulting pTZ35Sgateway/T5H plasmid was transformed into OmniMaxE. coli. The colonies were again screened using kanamycin and PCR, and positive colonies were grown overnight. After the bacteria were collected by centrifugation, the plasmid was isolated and analyzed using gel electrophoresis and PCR. The plasmid was then transformed into the moss P. patens expressing the taxadiene synthase (TS) gene, and the presence of taxadiene and taxadiene-ol was verified using GC-MS (see e.g., FIG. 2).

[0145] The transgenic moss which has incorporated both the taxadiene synthase (TS) and taxadiene-5α-hydroxylase (T5H) was compared to the moss which only incorporated taxadiene synthase. The concentration of taxadiene in the moss containing both TS and T5H is less than that found in the moss expressing only TS. This result is consistent with the conversion of taxadiene into taxadiene-ol. The results also indicate that taxadiene-ol is present in the moss that contains both T5H and TS, but not in the moss that only contains TS.

[0146] Results showed that taxadiene was produced up to 0.05% fresh weight of moss tissue, while trace amounts of taxadiene-ol were detected by GC-MS (see e.g., FIG. 2, peak 2A). The amounts of endogenous diterpenoids (ent-kaurene and 16-hydroxykaurane) in the transformed moss were not significantly affected. Transgenic P. patens did not exhibit any detrimental phenotypes, unlike higher plants that had been genetically modified to produce taxadiene.

[0147] The above experiments represent the first time that taxadiene-ol has been produced in any plant.

### Example 3

[0148] This example describes analysis of accumulated taxoids in transgenic P. patents expressing heterologous taxadiene synthase and taxadiene 5-hydroxylase.

[0149] Methods are as described in Examples 1-2, unless otherwise indicated.

[0150] An overexpression plasmid harboring the taxadiene-5α-hydroxylase gene (SEQ ID NO: 19) was transformed into the moss P. patens, which already carried the taxadiene synthase gene (SEQ ID NO: 1) from a previous transformation, as described in Example 2. Both genes were stably integrated into the genome and under the control of constitutive promoters (ubiquitin and 35S respectively).

[0151] Stable transformants of P. patens that overexpressed both taxadiene synthase and taxadiene-5α-hydroxylase were analyzed by gas chromatography and mass spectrometry.

[0152] Results showed transgenic mosses produced three taxoids, identified as taxadien-5-ol (as described in Example 2) along with 5(12)-oxa-3(11)-cyclotaxane; taxadien-11-ol; taxadien-18-ol; and taxadien-20-ol.

[0153] GC-MS analysis of terpenes was performed in transgenic moss protonema overexpressing taxadiene synthase (see e.g., FIG. 3A), transgenic moss protonema overexpressing both taxadiene synthase and taxadiene 5-hydroxylase (see e.g., FIG. 3B), and wild type moss protonema (see e.g., FIG. 3C). Overexpression of taxadiene synthase resulted in the formation of a peak (see e.g., peak 1A of FIG. 3A), which is not present in the wild type (see e.g., FIG. 3C). Peak 1A of FIG. 3A had a mass fragmentation pattern consistent with it being taxadiene (see e.g., FIG. 3D). Overexpression of taxadiene 5-hydroxylase together with taxadiene synthase resulted in a decrease in the above referenced peak 1A and the appearance of two other peaks (see e.g., peaks 2A and 3A in FIG. 3B). Peak 2A of FIG. 3B had a mass fragmentation pattern consistent with it being taxadien-20-ol (see FIG. 3E), while peak 3B of FIG. 3B had a mass fragmentation pattern of 5(12)-oxa-3(11)-cyclotaxane (see e.g., FIG. 3F).

[0154] Unlike transgenic moss protonema, the major product in gametophyte cultures is not taxadien-20-ol (see e.g., peak 1A in FIG. 4A), although it is still there as revealed by the mass spectra (see e.g., FIG. 4E). The major taxane product of transgenic moss gametophytes is 5(12)-oxa-3(11)-cyclotaxane (see e.g., unlabelled peak in FIGS. 4A, 4B, 4C and 4D) based on retention times and mass spectra (data not shown). Additionally, in all of the four gametophyte cultures, other peaks were also present (see e.g., peak 2A in FIG. 4B; peak 3A in FIG. 4C; peak 4A in FIG. 4D), which have mass spectra consistent with taxadien-5-ol (see e.g., FIG. 4F), taxadien-18-ol (see e.g., FIG. 4G), and taxadien-11-ol (see e.g., FIG. 4H), respectively.

[0155] Thus is demonstrated production of taxadien-5-ol; 5(12)-oxa-3(11)-cyclotaxane; taxadien-11-ol; taxadien-18-ol; and taxadien-20-ol from transgenic moss expressing taxadiene synthase and taxadiene-5α-hydroxylase. Production of these new taxanes by transgenic P. patens did not affect moss growth, which is in contrast to the developmental delays observed in higher plants when the same enzymes have been introduced in them genetically.

### Example 4

[0156] This example describes construction of overexpression plasmids.

[0157] Methods are as described in Examples 1-2, unless otherwise indicated.

[0158] The genes for taxoid hydroxylases (namely, taxadiene-5α-hydroxylase (SEQ ID NO: 19); taxane 10β-hydroxylase (SEQ ID NO: 33); and taxane 13α-hydroxylase (SEQ ID NO: 27)) and taxadiene-5α-ol acetyltransferase (SEQ ID NO: 201) were amplified and inserted into a plasmid vector.

[0159] Each of the genes were amplified by PCR using Pfx50™ (a thermostable DNA polymerase purchased from Invitrogen) in the presence of the corresponding forward and reverse primers (see Table 2), following the manufacturer's suggested protocol.

TABLE 2
Primers for gene amplication

| | Forward Primers | Reverse Primers | Destination | |
|---|---|---|---|---|
| Gene | (5′ to 3′) | (5′ to 3′) | vector* | Promoter |
| TS | CACCATGGCTTCAGCTC | TCATACTTGAATTGGA | pTHUBIgateway | Ubiquitin |
| | TCATTTAAT | TCAATATAAACTTT | (SEQ ID NO: 213) | |
| | (SEQ ID NO: 203) | (SEQ ID NO: 204) | | |
| T5H | CACCATGGACGCCCTG | CTATGGTCTCGGAAAC | pTZ35Sgateway | 35S |
| | TATAAGAGC | AGTTTAATGG | (SEQ ID NO: 214) | |
| | (SEQ ID NO: 205) | (SEQ ID NO: 206) | | |
| T10H | CACCATGGATAGCTTCA | TTAGGATCTCGGAAAA | pTN2X35Sgateway | 2 × 355 |
| | TTTTTCTGA | AGTTTTATGG | (SEQ ID NO: 215) | |
| | (SEQ ID NO: 207) | (SEQ ID NO: 208) | | |
| T13H | CACCATGGATGCCCTTA | TTAAGATCTGGAATAG | pTN2X35Sgateway | 2 × 355 |
| | AGCAATTGG | AGTTTAATGG | (SEQ ID NO: 215) | |
| | (SEQ ID NO: 209) | (SEQ ID NO: 210) | | |
| TAT | CACCATGGAGAAGACA | TCATACTTTAGCCACA | pTN2X35Sgateway | 2 × 355 |
| | GATTTACACG | TATTTTTTCAT | (SEQ ID NO: 215) | |
| | (SEQ ID NO: 211) | (SEQ ID NO: 212) | | |

[0160] The PCR products were cloned into pENTR entry vector using the TOPO Cloning kit of Invitrogen, following manufacturer's protocol. Each of the genes were then transferred to the destination vectors specified above using LR Clonase II (also from Invitrogen), following the manufacturer's protocol. This method was described in Transgenic Research (2009) 18, 655-660.

[0161] The integrity of the plasmids were verified by PCR, restriction digests and sequencing.

What is claimed is:

1. A moss cell comprising:
at least one heterologous nucleic acid molecule encoding a polypeptide having a diterpenoid biosynthetic activity;
at least one promoter functional in a moss cell; and
at least one transcriptional termination sequence;
wherein
the promoter, the at least one heterologous nucleic acid molecule, and the transcriptional termination sequence are operably associated in the 5′ to 3′ direction of transcription;
the polypeptide having a diterpenoid biosynthetic activity is selected from the group consisting of taxadiene synthase; taxadiene-5α-hydroxylase; taxadiene-5α-ol-acetyl transferase; taxane-13α-hydroxylase; taxane-10β-hydroxylase; taxoid 14β-hydroxylase; taxoid-9α-hydroxylase; taxoid-2α-hydroxylase; taxoid-7β-hydroxylase; 2α-hydroxytaxane 2-O-benzoyl transferase (i.e., taxoid-2α-O-benzoyl transferase); taxoid C1β-hydroxylase; taxoid C4β, C20-epoxidase; abietadiene synthase; abietadienol/abietadienal oxidase; ent-copalyl diphosphate synthase; ent-Kaurene synthase; ent-Kaurene oxidase; kaurenoic acid 13-hydroxylase; UDP-glycosyltransferase (UGT) converting steviolmonoside to steviolbioside; UGT85C2; UGT74G1; UGT76G1; CBT-ol cyclase; CYP71D16; syn-copalyl diphosphate synthase; syn-pimaradiene synthase; ent-sandaracopimaradiene synthase; syn-stemarene synthase; and ent-cassadiene synthase;
expression of the heterologous nucleic acid molecule in the cell results in production of at least one terpenoid compound selected from the group consisting of taxa-4(5),11(12)-diene; taxa-4(20),11(12)-diene; taxa-3(4),11(12)-diene; verticillene; taxadiene-5-ol; 5(12)-oxa-3(11)-cyclotaxane; taxadien-11-ol; taxadien-18-ol; taxadien-20-ol; 5α-hydroxy-taxa-4(20),11(12)-diene; 5α,13α-dihydroxy-taxa-4(20),11(12)-diene; 5α-acetoxy-taxa-4(20),11(12)-diene; 5α-acetoxy-10β-hydroxy-taxa-4(20),11(12)-diene; 5α-acetoxy-10β,14β-dihydroxy-taxadiene; taxadiene-5α-acetoxy-13β-ol; taxadiene-5α,13α-diol; taxadiene-5α-acetoxy-10β-ol; baccatin III; 10-deacetylbaccatin III; abietadiene; abietic acid; steviol; steviolmonoside; stevioside; rebaudioside A; forskolin; sclareol; kaurenoic acid; a cembranoid; momilactone A; momilactone B; oryzalexins A-F; oryzalexin S; and phytocassanes A-E.

2. The moss cell of claim 1 comprising:
a first heterologous nucleic acid molecule comprising a nucleotide sequence encoding a taxadiene synthase;
wherein,
the nucleotide sequence encoding taxadiene synthase is selected from the group consisting of
(i) a nucleotide sequence encoding a taxadiene synthase selected from the group consisting of SEQ ID NO: 1, SEQ ID NO: 3, SEQ ID NO: 5, SEQ ID NO: 7, SEQ ID NO: 9, SEQ ID NO: 11, SEQ ID NO: 13, SEQ ID NO: 15, and SEQ ID NO: 17, or at least about 90% sequence identity thereto and encoding a polypeptide having taxadiene synthase activity, or a complementary sequence thereto;
(ii) a nucleotide sequence encoding a polypeptide having a sequence selected from the group consisting of SEQ ID NO: 2, SEQ ID NO: 4, SEQ ID NO: 6, SEQ ID NO: 8, SEQ ID NO: 10, SEQ ID NO: 12, SEQ ID NO: 14, SEQ ID NO: 16, and SEQ ID NO: 18, or at least about 90% sequence identity thereto and having taxadiene synthase activity, or a complementary sequence thereto; and
(iii) an isolated polynucleotide that hybridizes under stringent conditions over the entire length of a sequence selected from the group consisting of SEQ ID NO: 2, SEQ ID NO: 4, SEQ ID NO: 6, SEQ ID NO: 8, SEQ ID NO: 10, SEQ ID NO: 12, SEQ ID NO: 14, SEQ ID NO: 16, and SEQ ID NO: 18, said stringent conditions comprising incubation at 65° C. in a solution comprising 6×SSC (0.9 M sodium chloride and 0.09 M sodium citrate), and which encodes a polypeptide having taxadiene synthase activity; and
the moss cell produces at least taxa-4(5),11(12)-diene.

3. The moss cell of claim 2 comprising:
a second heterologous nucleic acid molecule comprising a polynucleotide encoding a taxadiene 5α-hydroxylase;
wherein,
the nucleotide sequence encoding taxadiene 5α-hydroxylase is selected from the group consisting of
(i) a nucleotide sequence of SEQ ID NO: 19 or SEQ ID NO: 21, or at least about 90% sequence identity thereto and encoding a polypeptide having taxadiene 5a-hydroxylase activity, or a complementary sequence thereto;
(ii) a nucleotide sequence encoding a polypeptide having SEQ ID NO: 20 or SEQ ID NO: 22, or at least about 90% sequence identity thereto and having taxadiene 5α-hydroxylase activity, or a complementary sequence thereto; and
(iii) an isolated polynucleotide that hybridizes under stringent conditions over the entire length of SEQ ID NO: 19 or SEQ ID NO: 21; said stringent conditions comprising incubation at 65° C. in a solution comprising 6×SSC (0.9 M sodium chloride and 0.09 M sodium citrate); and which encodes a polypeptide having taxadiene 5α-hydroxylase activity; and
the moss cell produces one or more compounds selected from the group consisting of taxadiene-5-ol; 5(12)-oxa-3(11)-cyclotaxane; taxadien-11-ol; taxadien-18-ol; and taxadien-20-ol.

4. The moss cell of claim 3 comprising:
a third heterologous nucleic acid molecule comprising a polynucleotide encoding a taxane-13α-hydroxylase;
wherein,
the polynucleotide encoding taxane-13α-hydroxylase is selected from the group consisting of
(i) a nucleotide sequence of SEQ ID NO: 27, SEQ ID NO: 29, or SEQ ID NO: 31, or at least about 90% sequence identity thereto and encoding a polypeptide having taxane-13α-hydroxylase activity, or a complementary sequence thereto;
(ii) a nucleotide sequence encoding a polypeptide having SEQ ID NO: 28, SEQ ID NO: 30, or SEQ ID NO: 32, or at least about 90% sequence identity thereto and having taxane-13α-hydroxylase activity, or a complementary sequence thereto; and
(iii) an isolated polynucleotide that hybridizes under stringent conditions thereto over the entire length of SEQ ID NO: 27, SEQ ID NO: 29, or SEQ ID NO: 31, said stringent conditions comprising incubation at 65° C. in a solution comprising 6×SSC (0.9 M sodium chloride and 0.09 M sodium citrate), and which encodes a polypeptide having taxane-13α-hydroxylase activity; and
the moss cell produces at least taxadiene-5α,13α-diol.

5. The moss cell of claim 3 comprising:
a third heterologous nucleic acid molecule comprising a polynucleotide encoding a taxadiene-5α-ol-acetyl transferase;
wherein,
the polynucleotide encoding taxadiene-5α-ol-acetyl transferase is selected from the group consisting of
(i) a nucleotide sequence of SEQ ID NO: 23, SEQ ID NO: 25, or SEQ ID NO: 201, or at least about 90% sequence identity thereto and encoding a polypeptide having taxadiene-5α-ol-acetyl transferase activity, or a complementary sequence thereto;
(ii) a nucleotide sequence encoding a polypeptide having SEQ ID NO: 24, SEQ ID NO: 26, or SEQ ID NO: 202, or at least about 90% sequence identity thereto and having taxadiene-5α-ol-acetyl transferase activity, or a complementary sequence thereto; and
(iii) an isolated polynucleotide that hybridizes under stringent conditions thereto over the entire length of SEQ ID NO: 23, SEQ ID NO: 25, or SEQ ID NO: 201, said stringent conditions comprising incubation at 65° C. in a solution comprising 6×SSC (0.9 M sodium chloride and 0.09 M sodium citrate), and which encodes a polypeptide having taxadiene-5α-ol-acetyl transferase activity; and
the moss cell produces at least 5α-acetoxy-taxadiene.

6. The moss cell of claim 5 comprising:
a fourth heterologous nucleic acid molecule comprising a polynucleotide encoding a taxane-10β-hydroxylase;
wherein,
the polynucleotide encoding taxane-10β-hydroxylase is selected from the group consisting of
(i) a nucleotide sequence of SEQ ID NO: 33, SEQ ID NO: 35, SEQ ID NO: 37, or SEQ ID NO: 39, or at least about 90% sequence identity thereto and encoding a polypeptide having taxane-10β-hydroxylase activity, or a complementary sequence thereto;
(ii) a nucleotide sequence encoding a polypeptide having SEQ ID NO: 34, SEQ ID NO: 36, SEQ ID NO: 38, or SEQ ID NO: 40, or at least about 90% sequence identity thereto and having taxane-10β-hydroxylase activity, or a complementary sequence thereto; and
(iii) an isolated polynucleotide that hybridizes under stringent conditions thereto over the entire length of SEQ ID NO: 33, SEQ ID NO: 35, SEQ ID NO: 37, or SEQ ID NO: 39, said stringent conditions comprising incubation at 65° C. in a solution comprising 6×SSC (0.9 M sodium chloride and 0.09 M sodium citrate), and which encodes a polypeptide having taxane-10β-hydroxylase activity; and
the moss cell produces at least taxadiene-5α-acetoxy-10β-ol.

7. The moss cell of claim 1 comprising:
(A) a first heterologous nucleic acid molecule comprising a nucleotide sequence encoding an abietadiene synthase, wherein the moss cell produces at least abietadiene; or
(B) a first heterologous nucleic acid molecule comprising a nucleotide sequence encoding an abietadiene synthase and a second heterologous nucleic acid molecule comprising a nucleotide sequence encoding an abietadienol/abietadienal oxidase, wherein the moss cell produces at least abietic acid;
wherein,
(i) the polynucleotide encoding abietadiene synthase is selected from the group consisting of
(a) a nucleotide sequence of SEQ ID NO: 61, SEQ ID NO: 63, SEQ ID NO: 65, or SEQ ID NO: 67, or at least about 90% sequence identity thereto and encoding a polypeptide having abietadiene synthase activity, or a complementary sequence thereto;
(b) a nucleotide sequence encoding a polypeptide having SEQ ID NO: 62, SEQ ID NO: 64, SEQ ID NO: 66, or SEQ ID NO: 68, or at least about 90% sequence identity thereto and having abietadiene synthase activity, or a complementary sequence thereto; and
(c) an isolated polynucleotide that hybridizes under stringent conditions thereto over the entire length of SEQ ID NO: 61, SEQ ID NO: 63, SEQ ID NO: 65, or SEQ ID NO: 67, said stringent conditions comprising incubation at 65° C. in a solution comprising 6×SSC (0.9 M sodium chloride and 0.09 M sodium citrate), and which encodes a polypeptide having abietadiene synthase activity; and
(ii) the polynucleotide encoding abietadienol/abietadienal oxidase is selected from the group consisting of
(a) a nucleotide sequence of SEQ ID NO: 69, or at least about 90% sequence identity thereto and encoding a polypeptide having abietadienol/abietadienal oxidase activity, or a complementary sequence thereto;
(b) a nucleotide sequence encoding a polypeptide having SEQ ID NO: 70, or at least about 90% sequence identity thereto and having abietadienol/abietadienal oxidase activity, or a complementary sequence thereto; and
(c) an isolated polynucleotide that hybridizes under stringent conditions thereto over the entire length of SEQ ID NO: 69, said stringent conditions comprising incubation at 65° C. in a solution comprising 6×SSC (0.9 M sodium chloride and 0.09 M sodium citrate), and which encodes a polypeptide having abietadienol/abietadienal oxidase activity.

8. The moss cell of claim 1 comprising:
(A) a first heterologous nucleic acid molecule comprising a nucleotide sequence encoding an ent-copalyl diphosphate synthase;
a second heterologous nucleic acid molecule comprising a nucleotide sequence encoding an ent-Kaurene synthase; and
a third heterologous nucleic acid molecule comprising a nucleotide sequence encoding an ent-Kaurene oxidase;
wherein the moss cell produces at least kaurenoic acid;
(B) a first heterologous nucleic acid molecule comprising a nucleotide sequence encoding an ent-copalyl diphosphate synthase;
a second heterologous nucleic acid molecule comprising a nucleotide sequence encoding an ent-Kaurene synthase;
a third heterologous nucleic acid molecule comprising a nucleotide sequence encoding an ent-Kaurene oxidase; and
a fourth heterologous nucleic acid molecule comprising a nucleotide sequence encoding an kaurenoic acid 13-hydroxylase;
wherein the moss cell produces at least steviol;
(C) a first heterologous nucleic acid molecule comprising a nucleotide sequence encoding an ent-copalyl diphosphate synthase;
a second heterologous nucleic acid molecule comprising a nucleotide sequence encoding an ent-Kaurene synthase;
a third heterologous nucleic acid molecule comprising a nucleotide sequence encoding an ent-Kaurene oxidase; and
a fourth heterologous nucleic acid molecule comprising a nucleotide sequence encoding an kaurenoic acid 13-hydroxylase; and
a fifth heterologous nucleic acid molecule comprising a nucleotide sequence encoding an UDP-glycosyltransferase (UGT) UGT85C2;
wherein the moss cell produces at least steviolmonoside;
(D) a first heterologous nucleic acid molecule comprising a nucleotide sequence encoding an ent-copalyl diphosphate synthase;
a second heterologous nucleic acid molecule comprising a nucleotide sequence encoding an ent-Kaurene synthase;
a third heterologous nucleic acid molecule comprising a nucleotide sequence encoding an ent-Kaurene oxidase; and
a fourth heterologous nucleic acid molecule comprising a nucleotide sequence encoding an kaurenoic acid 13-hydroxylase;
a fifth heterologous nucleic acid molecule comprising a nucleotide sequence encoding an UDP-glycosyltransferase (UGT) UGT85C2; and
a sixth heterologous nucleic acid molecule comprising a nucleotide sequence encoding a UGT74G1;
wherein the moss cell produces at least stevioside; or
(E) a first heterologous nucleic acid molecule comprising a nucleotide sequence encoding an ent-copalyl diphosphate synthase;
a second heterologous nucleic acid molecule comprising a nucleotide sequence encoding an ent-Kaurene synthase;
a third heterologous nucleic acid molecule comprising a nucleotide sequence encoding an ent-Kaurene oxidase; and
a fourth heterologous nucleic acid molecule comprising a nucleotide sequence encoding an kaurenoic acid 13-hydroxylase;
a fifth heterologous nucleic acid molecule comprising a nucleotide sequence encoding an UDP-glycosyltransferase (UGT) UGT85C2; and
a sixth heterologous nucleic acid molecule comprising a nucleotide sequence encoding a UGT74G1; and
a seventh heterologous nucleic acid molecule comprising a nucleotide sequence encoding a UGT76G1;
wherein the moss cell produces at least rebaudioside A;
wherein
(i) the polynucleotide encoding ent-copalyl diphosphate synthase is selected from the group consisting of
(a) a nucleotide sequence of SEQ ID NO: 71, SEQ ID NO: 73, SEQ ID NO: 75, SEQ ID NO: 77, SEQ ID NO: 79, SEQ ID NO: 81, SEQ ID NO: 83, SEQ ID NO: 85, SEQ ID NO: 87, SEQ ID NO: 89, SEQ ID NO: 91, SEQ ID NO: 93, SEQ ID NO: 95, SEQ ID NO: 97, SEQ ID NO: 99, SEQ ID NO: 101, SEQ ID NO: 103, SEQ ID NO: 105, SEQ ID NO: 107, SEQ ID NO: 109, SEQ ID NO: 111, SEQ ID NO: 113, or SEQ ID NO: 115, or at least about 90% sequence identity thereto and encoding a polypeptide having ent-copalyl diphosphate synthase activity, or a complementary sequence thereto;
(b) a nucleotide sequence encoding a polypeptide having SEQ ID NO: 72, SEQ ID NO: 74, SEQ ID NO: 76, SEQ ID NO: 78, SEQ ID NO: 80, SEQ ID NO: 82, SEQ ID NO: 84, SEQ ID NO: 86, SEQ ID NO: 88, SEQ ID NO: 90, SEQ ID NO: 92, SEQ ID NO: 94, SEQ ID NO: 96, SEQ ID NO: 98, SEQ ID NO: 100, SEQ ID NO: 102, SEQ ID NO: 104, SEQ ID NO: 106, SEQ ID NO: 108, SEQ ID NO: 110, SEQ ID NO: 112, SEQ ID NO: 114, or SEQ ID NO: 116, or at least about 90% sequence identity thereto and having ent-copalyl diphosphate synthase activity, or a complementary sequence thereto; and
(c) an isolated polynucleotide that hybridizes under stringent conditions thereto over the entire length of SEQ ID NO: 71, SEQ ID NO: 73, SEQ ID NO: 75, SEQ ID NO: 77, SEQ ID NO: 79, SEQ ID NO: 81, SEQ ID NO: 83, SEQ ID NO: 85, SEQ ID NO: 87, SEQ ID NO: 89, SEQ ID NO: 91, SEQ ID NO: 93, SEQ ID NO: 95, SEQ ID NO: 97, SEQ ID NO: 99, SEQ ID NO: 101, SEQ ID NO: 103, SEQ ID NO: 105, SEQ ID NO: 107, SEQ ID NO: 109, SEQ ID NO: 111, SEQ ID NO: 113, or SEQ ID NO: 115, said stringent conditions comprising incubation at 65° C. in a solution comprising 6×SSC (0.9 M sodium chloride and 0.09 M sodium citrate), and which encodes a polypeptide having ent-copalyl diphosphate synthase activity;
(ii) the polynucleotide encoding ent-Kaurene synthase is selected from the group consisting of
(a) a nucleotide sequence of SEQ ID NO: 117, SEQ ID NO: 119, SEQ ID NO: 121, SEQ ID NO: 123, SEQ ID NO: 125, SEQ ID NO: 127, SEQ ID NO: 129, SEQ ID NO: 131, SEQ ID NO: 133, SEQ ID NO: 135, SEQ ID NO: 137, SEQ ID NO: 139, SEQ ID NO: 141, or SEQ ID NO: 143, or at least about 90% sequence identity thereto and encoding a polypeptide having ent-Kaurene synthase activity, or a complementary sequence thereto;
(b) a nucleotide sequence encoding a polypeptide having SEQ ID NO: 118, SEQ ID NO: 120, SEQ ID NO: 122, SEQ ID NO: 124, SEQ ID NO: 126, SEQ ID NO: 128, SEQ ID NO: 130, SEQ ID NO: 132, SEQ ID NO: 134, SEQ ID NO: 136, SEQ ID NO: 138, SEQ ID NO: 140, SEQ ID NO: 142, or SEQ ID NO: 144, or at least about 90% sequence identity thereto and having ent-Kaurene synthase activity, or a complementary sequence thereto; and
(c) an isolated polynucleotide that hybridizes under stringent conditions thereto over the entire length of SEQ ID NO: 117, SEQ ID NO: 119, SEQ ID NO: 121, SEQ ID NO: 123, SEQ ID NO: 125, SEQ ID NO: 127, SEQ ID NO: 129, SEQ ID NO: 131, SEQ ID NO: 133, SEQ ID NO: 135, SEQ ID NO: 137, SEQ ID NO: 139, SEQ ID NO: 141, or SEQ ID NO: 143, said stringent conditions comprising incubation at 65° C. in a solution comprising 6×SSC (0.9 M sodium chloride and 0.09 M sodium citrate), and which encodes a polypeptide having ent-Kaurene synthase activity; and
(iii) the polynucleotide encoding ent-Kaurene oxidase is selected from the group consisting of
(a) a nucleotide sequence of SEQ ID NO: 145, SEQ ID NO: 147, SEQ ID NO: 149, SEQ ID NO: 151, SEQ ID NO: 153, SEQ ID NO: 155, SEQ ID NO: 157, SEQ ID NO: 159, SEQ ID NO: 161, SEQ ID NO: 163, SEQ ID NO: 165, SEQ ID NO: 167, SEQ ID NO: 169, SEQ ID NO: 171, or SEQ ID NO: 173, or at least about 90% sequence identity thereto and encoding a polypeptide having ent-Kaurene oxidase activity, or a complementary sequence thereto;
(b) a nucleotide sequence encoding a polypeptide having SEQ ID NO: 146, SEQ ID NO: 148, SEQ ID NO: 150, SEQ ID NO: 152, SEQ ID NO: 154, SEQ ID NO: 156, SEQ ID NO: 158, SEQ ID NO: 160, SEQ ID NO: 162, SEQ ID NO: 164, SEQ ID NO: 166, SEQ ID NO: 168, SEQ ID NO: 170, SEQ ID NO: 172, or SEQ ID NO: 174, or at least about 90% sequence identity thereto and having ent-Kaurene oxidase activity, or a complementary sequence thereto; and
(c) an isolated polynucleotide that hybridizes under stringent conditions thereto over the entire length of SEQ ID NO: 145, SEQ ID NO: 147, SEQ ID NO: 149, SEQ ID NO: 151, SEQ ID NO: 153, SEQ ID NO: 155, SEQ ID NO: 157, SEQ ID NO: 159, SEQ ID NO: 161, SEQ ID NO: 163, SEQ ID NO: 165, SEQ ID NO: 167, SEQ ID NO: 169, SEQ ID NO: 171, or SEQ ID NO: 173, said stringent conditions comprising incubation at 65° C. in a solution comprising 6×SSC (0.9 M sodium chloride and 0.09 M sodium citrate), and which encodes a polypeptide having ent-Kaurene oxidase activity;
(iv) the polynucleotide encoding kaurenoic acid 13-hydroxylase is selected from the group consisting of
(a) a nucleotide sequence of SEQ ID NO: 175, or at least about 90% sequence identity thereto and encoding a polypeptide having—kaurenoic acid 13-hydroxylase activity, or a complementary sequence thereto;
(b) a nucleotide sequence encoding a polypeptide having SEQ ID NO: 176, or at least about 90% sequence identity thereto and having—kaurenoic acid 13-hydroxylase activity, or a complementary sequence thereto; and
(c) an isolated polynucleotide that hybridizes under stringent conditions thereto over the entire length of SEQ ID NO: 175, said stringent conditions comprising incubation at 65° C. in a solution comprising 6×SSC (0.9 M sodium chloride and 0.09 M sodium citrate), and which encodes a polypeptide having kaurenoic acid 13-hydroxylase activity;
(v) the polynucleotide encoding UDP-glycosyltransferase (UGT) UGT85C2 is selected from the group consisting of
(a) a nucleotide sequence of SEQ ID NO: 177, or at least about 90% sequence identity thereto and encoding a polypeptide having UDP-glycosyltransferase activity, or a complementary sequence thereto;
(b) a nucleotide sequence encoding a polypeptide having SEQ ID NO: 178, or at least about 90% sequence identity thereto and having—UDP-glycosyltransferase activity, or a complementary sequence thereto; and
(c) an isolated polynucleotide that hybridizes under stringent conditions thereto over the entire length of SEQ ID NO: 177, said stringent conditions comprising incubation at 65° C. in a solution comprising 6×SSC (0.9 M sodium chloride and 0.09 M sodium citrate), and which encodes a polypeptide having UDP-glycosyltransferase activity; and
(vi) the polynucleotide encoding UGT74G1 is selected from the group consisting of
(a) a nucleotide sequence of SEQ ID NO: 179, or at least about 90% sequence identity thereto and encoding a polypeptide having UDP-glycosyltransferase activity, or a complementary sequence thereto;
(b) a nucleotide sequence encoding a polypeptide having SEQ ID NO: 180, or at least about 90% sequence identity thereto and having—UDP-glycosyltransferase activity, or a complementary sequence thereto; and
(c) an isolated polynucleotide that hybridizes under stringent conditions thereto over the entire length of SEQ ID NO: 179, said stringent conditions comprising incubation at 65° C. in a solution comprising 6×SSC (0.9 M sodium chloride and 0.09 M sodium citrate), and which encodes a polypeptide having UDP-glycosyltransferase activity; and
(vii) the polynucleotide encoding UGT76G1 is selected from the group consisting of
(a) a nucleotide sequence of SEQ ID NO: 181, or at least about 90% sequence identity thereto and encoding a polypeptide having UDP-glycosyltransferase activity, or a complementary sequence thereto;
(b) a nucleotide sequence encoding a polypeptide having SEQ ID NO: 182, or at least about 90% sequence identity thereto and having UDP-glycosyltransferase activity, or a complementary sequence thereto; and
(c) an isolated polynucleotide that hybridizes under stringent conditions thereto over the entire length of SEQ ID NO: 181, said stringent conditions comprising incubation at 65° C. in a solution comprising 6×SSC (0.9 M sodium chloride and 0.09 M sodium citrate), and which encodes a polypeptide having UDP-glycosyltransferase activity.

9. The moss cell of claim 1 comprising:
a first heterologous nucleic acid molecule comprising a nucleotide sequence encoding a CBT-ol cyclase; and
a second heterologous nucleic acid molecule comprising a nucleotide sequence encoding a CYP71D16;
wherein
(A) the polynucleotide encoding CBT-ol cyclase is selected from the group consisting of
(i) a nucleotide sequence of SEQ ID NO: 183 or SEQ ID NO: 185, or at least about 90% sequence identity thereto and encoding a polypeptide having CBT-ol cyclase activity, or a complementary sequence thereto;
(ii) a nucleotide sequence encoding a polypeptide having SEQ ID NO: 184 or SEQ ID NO: 186, or at least about 90% sequence identity thereto and having CBT-ol cyclase activity, or a complementary sequence thereto; and
(iii) an isolated polynucleotide that hybridizes under stringent conditions thereto over the entire length of SEQ ID NO: 183 or SEQ ID NO: 185, said stringent conditions comprising incubation at 65° C. in a solution comprising 6×SSC (0.9 M sodium chloride and 0.09 M sodium citrate), and which encodes a polypeptide having CBT-ol cyclase activity; and
(B) the polynucleotide encoding CYP71D16 is selected from the group consisting of
(i) a nucleotide sequence of SEQ ID NO: 187, or at least about 90% sequence identity thereto and encoding a polypeptide having CYP71D16 activity, or a complementary sequence thereto;
(ii) a nucleotide sequence encoding a polypeptide having SEQ ID NO: 188, or at least about 90% sequence identity thereto and having CYP71D16 activity, or a complementary sequence thereto; and
(iii) an isolated polynucleotide that hybridizes under stringent conditions thereto over the entire length of SEQ ID NO: 187, said stringent conditions comprising incubation at 65° C. in a solution comprising 6×SSC (0.9 M sodium chloride and 0.09 M sodium citrate), and which encodes a polypeptide having CYP71D16 activity; and
the moss cell produces at least a cembranoid.

10. The moss cell of claim 1 comprising:
a first heterologous nucleic acid molecule comprising a nucleotide sequence encoding a syn-copalyl diphosphate synthase; and
a second heterologous nucleic acid molecule comprising a nucleotide sequence encoding a syn-pimaradiene synthase;
wherein
(A) the polynucleotide encoding syn-copalyl diphosphate synthase is selected from the group consisting of
(i) a nucleotide sequence of SEQ ID NO: 189, or at least about 90% sequence identity thereto and encoding a polypeptide having syn-copalyl diphosphate synthase activity, or a complementary sequence thereto;
(ii) a nucleotide sequence encoding a polypeptide having SEQ ID NO: 190, or at least about 90% sequence identity thereto and having—syn-copalyldiphosphate synthase activity, or a complementary sequence thereto; and
(iii) an isolated polynucleotide that hybridizes under stringent conditions thereto over the entire length of said sequence; said stringent conditions comprising incubation at 65° C. in a solution comprising 6×SSC (0.9 M sodium chloride and 0.09 M sodium citrate); and which encodes a polypeptide having syn-copalyl diphosphate synthase activity; and
(B) the polynucleotide encoding syn-pimaradiene synthase is selected from the group consisting of
(i) a nucleotide sequence of SEQ ID NO: 191 or SEQ ID NO: 193, or at least about 90% sequence identity thereto and encoding a polypeptide having syn-pimaradiene synthase activity, or a complementary sequence thereto;
(ii) a nucleotide sequence encoding a polypeptide having SEQ ID NO: 192 or SEQ ID NO: 194, or at least about 90% sequence identity thereto and having syn-pimaradiene synthase activity, or a complementary sequence thereto; and
(iii) an isolated polynucleotide that hybridizes under stringent conditions thereto over the entire length of SEQ ID NO: 191 or SEQ ID NO: 193, said stringent conditions comprising incubation at 65° C. in a solution comprising 6×SSC (0.9 M sodium chloride and 0.09 M sodium citrate), and which encodes a polypeptide having syn-pimaradiene synthase activity; and
the moss cell produces at least momilactone A or momilactone B.

11. The moss cell of claim 1 comprising:
a first heterologous nucleic acid molecule comprising a nucleotide sequence encoding a ent-Copalyl diphosphate synthase; and
a second heterologous nucleic acid molecule comprising a nucleotide sequence encoding a ent-sandaracopimaradiene synthase;
wherein
(A) the polynucleotide encoding ent-Copalyl diphosphate synthase is selected from the group consisting of
(i) a nucleotide sequence of SEQ ID NO: 189, or at least about 90% sequence identity thereto and encoding a polypeptide having ent-copalyl diphosphate synthase activity, or a complementary sequence thereto;
(ii) a nucleotide sequence encoding a polypeptide having SEQ ID NO: 190, or at least about 90% sequence identity thereto and having—ent-copalyldiphosphate synthase activity, or a complementary sequence thereto; and
(iii) an isolated polynucleotide that hybridizes under stringent conditions thereto over the entire length of SEQ ID NO: 189, said stringent conditions comprising incubation at 65° C. in a solution comprising 6×SSC (0.9 M sodium chloride and 0.09 M sodium citrate), and which encodes a polypeptide having ent-copalyl diphosphate synthase activity; and
(B) the polynucleotide encoding ent-sandaracopimaradiene synthase is selected from the group consisting of
(i) a nucleotide sequence of SEQ ID NO: 195, or at least about 90% sequence identity thereto and encoding a polypeptide having ent-sandaracopimaradiene synthase activity, or a complementary sequence thereto;
(ii) a nucleotide sequence encoding a polypeptide having SEQ ID NO: 196, or at least about 90% sequence identity thereto and having ent-sandaracopimaradiene synthase activity, or a complementary sequence thereto; and
(iii) an isolated polynucleotide that hybridizes under stringent conditions thereto over the entire length of SEQ ID NO: 195, said stringent conditions comprising incubation at 65° C. in a solution comprising 6×SSC (0.9 M sodium chloride and 0.09 M sodium citrate), and which encodes a polypeptide having ent-sandaracopimaradiene synthase activity; and
the moss cell produces at least one of oryzalexins A, B, C, D, E, or F.

12. The moss cell of claim 1 comprising:
a first heterologous nucleic acid molecule comprising a nucleotide sequence encoding a syn-copalyl diphosphate synthase; and
a second heterologous nucleic acid molecule comprising a nucleotide sequence encoding a syn-stemarene synthase;
wherein
(A) the polynucleotide encoding syn-copalyl diphosphate synthase is selected from the group consisting of
(i) a nucleotide sequence of SEQ ID NO: 189, or at least about 90% sequence identity thereto and encoding a polypeptide having syn-copalyl diphosphate synthase activity, or a complementary sequence thereto;
(ii) a nucleotide sequence encoding a polypeptide having SEQ ID NO: 190, or at least about 90% sequence identity thereto and having—syn-copalyldiphosphate synthase activity, or a complementary sequence thereto; and
(iii) an isolated polynucleotide that hybridizes under stringent conditions thereto over the entire length of said sequence; said stringent conditions comprising incubation at 65° C. in a solution comprising 6×SSC (0.9 M sodium chloride and 0.09 M sodium citrate); and which encodes a polypeptide having syn-copalyl diphosphate synthase activity; and
(B) the polynucleotide encoding syn-stemarene synthase is selected from the group consisting of
(i) a nucleotide sequence of SEQ ID NO: 197, or at least about 90% sequence identity thereto and encoding a polypeptide having syn-stemarene synthase activity, or a complementary sequence thereto;
(ii) a nucleotide sequence encoding a polypeptide having SEQ ID NO: 198, or at least about 90% sequence identity thereto and having syn-stemarene synthase activity, or a complementary sequence thereto; and
(iii) an isolated polynucleotide that hybridizes under stringent conditions thereto over the entire length of SEQ ID NO: 197, said stringent conditions comprising incubation at 65° C. in a solution comprising 6×SSC (0.9 M sodium chloride and 0.09 M sodium citrate), and which encodes a polypeptide having syn-stemarene synthase activity; and
the moss cell produces at least oryzalexin S.

13. The moss cell of claim 1 comprising:
a first heterologous nucleic acid molecule comprising a nucleotide sequence encoding a ent-Copalyl diphosphate synthase; and
a second heterologous nucleic acid molecule comprising a nucleotide sequence encoding a ent-cassadiene synthase;
wherein,
(A) the polynucleotide encoding ent-Copalyl diphosphate synthase is selected from the group consisting of
(i) a nucleotide sequence of SEQ ID NO: 189, or at least about 90% sequence identity thereto and encoding a polypeptide having ent-copalyl diphosphate synthase activity, or a complementary sequence thereto;
(ii) a nucleotide sequence encoding a polypeptide having SEQ ID NO: 190, or at least about 90% sequence identity thereto and having—ent-copalyldiphosphate synthase activity, or a complementary sequence thereto; and
(iii) an isolated polynucleotide that hybridizes under stringent conditions thereto over the entire length of SEQ ID NO: 189, said stringent conditions comprising incubation at 65° C. in a solution comprising 6×SSC (0.9 M sodium chloride and 0.09 M sodium citrate), and which encodes a polypeptide having ent-copalyl diphosphate synthase activity; and
(B) the polynucleotide encoding ent-cassadiene synthase is selected from the group consisting of
(i) a nucleotide sequence of SEQ ID NO: 199, or at least about 90% sequence identity thereto and encoding a polypeptide having ent-cassadiene synthase activity, or a complementary sequence thereto;
(ii) a nucleotide sequence encoding a polypeptide having SEQ ID NO: 200, or at least about 90% sequence identity thereto having ent-cassadiene synthase activity, or a complementary sequence thereto; and
(iii) an isolated polynucleotide that hybridizes under stringent conditions thereto over the entire length of SEQ ID NO: 199, said stringent conditions comprising incubation at 65° C. in a solution comprising 6×SSC (0.9 M sodium chloride and 0.09 M sodium citrate), and which encodes a polypeptide having ent-cassadiene synthase activity; and
the moss cell produces at least one of phytocassanes A-E.

14. The moss cell of claim 1, wherein
(i) expression or activity is reduced or eliminated for one or more of Mevalonate diphosphate decarboxylase; Mevalonate kinase; HMG-CoA reductase; Squalene epoxidase; 4-Hydroxyphenylpyruvate dioxygenase; Geranylgeranyl pyrophosphate synthase; ent-Kaurene synthetase; Chorismate mutase; Farnesyl pyrophosphate synthase; Phytoene synthase; Adenylate isopentenyltransferase; Squalene-hopene-cyclase; γ-Tocopherol methyltransferase; Geranylgeranyl reductase; Phytoene desaturase; ζ-Carotene desaturase; Geranylgeranyltransferase I; Zeaxanthin epoxidase; Copalyl diphosphate synthase; 2-Heptaprenyl-1,4-naphthoquinone methyltransferase; 9-cis-Epoxycarotenoid cleavage dioxygenase; 1-Deoxy-D-xylulose 5-phosphate synthase; Lycopene ε cyclase; and 2-Methyl-6-phytylhydroquinone 3-methyltransferase; or
(ii) expression or activity of diterpene synthase or kaurene synthase is reduced or eliminated and the moss cell produces decreased levels of ent-kaurene or 16-hydroxykaurane compared to a moss cell not comprising the DNA construct.

15. A method of producing a terpenoid compound comprising culturing the moss cell of claim 1.

16. A method of producing a moss cell according to claim 1 comprising:
introducing into the moss cell at least a first heterologous nucleic acid molecule;
wherein expression of the heterologous nucleic acid molecule in the cell results in production of at least one terpenoid compound selected from the group consisting of taxa-4(5),11(12)-diene; taxa-4(20),11(12)-diene; taxa-3(4),11(12)-diene; verticillene; taxadiene-5-ol; 5(12)-oxa-3(11)-cyclotaxane; taxadien-11-ol; taxadien-18-ol; taxadien-20-ol; 5α-hydroxy-taxa-4(20),11(12)-diene; 5α,13α-dihydroxy-taxa-4(20),11(12)-diene; 5α-acetoxy-taxa-4(20),11(12)-diene; 5α-acetoxy-10β-hydroxy-taxa-4(20),11(12)-diene; 5α-acetoxy-10β,14β-dihydroxy-taxadiene; taxadiene-5α-acetoxy-13β-ol; taxadiene-5α,13α-diol; taxadiene-5α-acetoxy-10β-ol; baccatin Ill; 10-deacetylbaccatin III; abietadiene; abietic acid; steviol; steviolmonoside; stevioside; rebaudioside A; forskolin; sclareol; kaurenoic acid; a cembranoid; momilactone A; momilactone B; oryzalexins A-F; oryzalexin S; and phytocassanes A-E.

The application's sequence listing, which the Patent Office published only in electronic form, follows.

SEQUENCE LISTING (215 sequences)

SEQ ID NO: 1 - DNA, 2700 bp, Taxus brevifolia
ttcccctgcctctctggagaaatggctcagctctcatttaatgcagcgctgaagatgaacgcattggggaacaaggcaatccacgatccaacgaattgcagagccaaatctgagcgccaaatgatgtgggtttgctccagatcagggcgaaccagagtaaaaatgtcgagaggaagtggtggtcctggtcctgtcgtaatgatgagcagcagcactggcactagcaaggtggtttccgagacttccagtaccattgtggatgatatccctcgactctccgccaattatcatggcgatctgtggcaccacaatgttatacaaactctggagacaccgtttcgtgagagttctacttaccaagaacgggcagatgagctggttgtgaaaattaaagatatgttcaatgcgctcggagacggagatatcagtccgtctgcatacgacactgcgtgggtggcgaggctggcgaccatttcctctgatggatctgagaagccacggtttcctcaggccctcaactgggttttcaacaaccagctccaggatggatcgtggggtatcgaatcgcactttagtttatgcgatcgattgcttaacacgaccaattctgttatcgccctctcggtttggaaaacagggcacagccaagtacaacaaggtgctgagtttattgcagagaatctaagattactcaatgaggaagatgagttgtccccggatttccaaataatctttcctgctctgctgcaaaaggcaaaagcgttggggatcaatcttccttacgatcttccatttatcaaatatttgtcgacaacacgggaagccaggcttacagatgtttctgcggcagcagacaatattccagccaacatgttgaatgcgttggaaggtctcgaggaagttattgactggaacaagattatgaggtttcaaagtaaagatggatctttcctgagctcccctgcctccactgcctgtgtactgatgaatacaggggacgaaaaatgtttcacttttctcaacaatctgctcgacaaattcggcggctgcgtgccctgtatgtattccatcgatctgctggaacgcctttcgctggttgataacattgagcatctcggaatcggtcgccatttcaaacaagaaatcaaaggagctcttgattatgtctacagacattggagtgaaaggggcatcggttggggcagagacagccttgttccagatctcaacaccacagccctcggcctgcgaactcttcgcatgcacggatacaatgtttcttcagacgttttgaataatttcaaagatgaaaacgggcggttcttctcctctgcgggccaaacccatgtcgaattgagaagcgtggtgaatcttttcagagcttccgaccttgcatttcctgacgaaagagctatggacgatgctagaaaatttgcagaaccatatcttagagaggcacttgcaacgaaaatctcaaccaatacaaaactattcaaagagattgagtacgtggtggagtacccttggcacatgagtatcccacgcttagaagccagaagttatattgattcatatgacgacaattatgtatggcagaggaagactctatatagaatgccatctttgagtaattcaaaatgtttagaattggcaaaattggacttcaatatcgtacaatctttgcatcaagaggagttgaagcttctaacaagatggtggaaggaatccggcatggcagatataaatttcactcgacaccgagtggcggaggtttatttttcatcagctacatttgaacccgaatattctgccactagaattgccttcacaaaaattggttgtttacaagtcctttttgatgatatggctgacatctttgcaacactagatgaattgaaaagtttcactgagggagtaaagagatgggatacatctttgctacatgagattccagagtgtatgcaaacttgctttaaagtttggttcaaattaatggaagaagtaaataatgatgtggttaaggtacaaggacgtgacatgctcgctcacataagaaaaccctgggagttgtacttcaattgttatgtacaagaaagggagtggcttgaagccgggtatataccaacttttgaagagtacttaaagacttatgctatatcagtaggccttggaccgtgtaccctacaaccaatactactaatgggtgagcttgtgaaagatgatgttgttgagaaagtgcactatccctcaaatatgtttgagcttgtatccttgagctggcgactaacaaacgacaccaaaacatatcaggctgaaaaggctcgaggacaacaagcctcaggcatagcatgctatatgaaggataatccaggagcaactgaggaagatgccattaagcacatatgtcgtgttgttgatcgggccttgaaagaagcaagctttgaatatttcaaaccatccaatgatatcccaatgggttgcaagtcctttatttttaaccttagattgtgtgtccaaatcttttacaagtttatagatgggtacggaatcgccaatgaggagattaaggactatataagaaaagtttatattgatccaattcaagtatgatatatcatgtaaaacctctttttcatgataaattgacttattattgtattggcaaaaaaaaaaaaaaaaaaaaaaaaaaaaaaaaaaaaa

SEQ ID NO: 2 - protein, 862 aa, Taxus brevifolia
MAQLSFNAALKMNALGNKAIHDPTNCRAKSERQMMWVCSRSGRTRVKMSRGSGGPGPVVMMSSSTGTSKVVSETSSTIVDDIPRLSANYHGDLWHHNVIQTLETPFRESSTYQERADELVVKIKDMFNALGDGDISPSAYDTAWVARLATISSDGSEKPRFPQALNWVFNNQLQDGSWGIESHFSLCDRLLNTTNSVIALSVWKTGHSQVQQGAEFIAENLRLLNEEDELSPDFQIIFPALLQKAKALGINLPYDLPFIKYLSTTREARLTDVSAAADNIPANMLNALEGLEEVIDWNKIMRFQSKDGSFLSSPASTACVLMNTGDEKCFTFLNNLLDKFGGCVPCMYSIDLLERLSLVDNIEHLGIGRHFKQEIKGALDYVYRHWSERGIGWGRDSLVPDLNTTALGLRTLRMHGYNVSSDVLNNFKDENGRFFSSAGQTHVELRSVVNLFRASDLAFPDERAMDDARKFAEPYLREALATKISTNTKLFKEIEYVVEYPWHMSIPRLEARSYIDSYDDNYVWQRKTLYRMPSLSNSKCLELAKLDFNIVQSLHQEELKLLTRWWKESGMADINFTRHRVAEVYFSSATFEPEYSATRIAFTKIGCLQVLFDDMADIFATLDELKSFTEGVKRWDTSLLHEIPECMQTCFKVWFKLMEEVNNDVVKVQGRDMLAHIRKPWELYFNCYVQEREWLEAGYIPTFEEYLKTYAISVGLGPCTLQPILLMGELVKDDVVEKVHYPSNMFELVSLSWRLTNDTKTYQAEKARGQQASGIACYMKDNPGATEEDAIKHICRVVDRALKEASFEYFKPSNDIPMGCKSFIFNLRLCVQIFYKFIDGYGIANEEIKDYIRKVYIDPIQV

SEQ ID NO: 3 - DNA, 2706 bp, Taxus wallichiana var. chinensis
gggtaccatggctcagctctcatttaatgcagcgctgaagatgaatgcattggggaacaaggcaatccacgatccaacgaattgcagagccaaatctgagggccaaatgatgtgggtttgctccaaatcagggcgaaccagagtaaaaatgtcgagaggaagtggtggtcctggtcctgtcgtaatgatgagcagcagcactggcactagcaaggtggtttccgagacttccagtaccattgtggatgatatccctcgactctccgccaattatcatggcgatctgtggcaccacaatgttatacaaactctggagacaccatttcgtgagagttctacttaccaagaacgggcagatgagctggttgtgaaaattaaagatatgttcaatgcgctcggagacggagatatcagtccgtctgcatacgacactgcgtgggtggcgagggtggcgaccatttcctctgatggatctgagaagccacggtttcctcaggctctcaactgggttttcaacaaccagctccaggatggatcgtggggtatcgaatcgcactttagtttatgcgatcgattgcttaacacgaccaattctgttatcgccctctcggtttggaaaacagggcacagccaagtagaacaaggtactgagtttattgcagagaatctaagattactcaatgaggaagatgagttgtccccggatttcgaaataatctttcctgctctgctgcaaaaggcaaaagcgttggggatcaatcttccttacgatcttccatttatcaaatatttgtcgacaacacgggaagccaggcttacagatgtttctgcggcagcagacaatattccagccaacatgttgaatgcgttggagggtcttgaggaagttatggactggaagaagattatgaggtttcaaagtaaagatggatctttcctgagctcccctgcttccactgcctgtgtactgatgaatacaggggacgaaaaatgtttcacttttctcaacaatctgctggtcaaattcggcggctgcgtgccctgtatgtattccatcgatctgctggaacgcctttcgctggttgataacattgagcatctcggaatcggtcgccatttcaaacaagaaatcaaagtagctcttgattatgtctacagacattggagtgaaaggggcatcggttggggcagagacagcctcgttccagatctcaacacaacagccctcggcctgcgaactcttcgcacgcacggatacgatgtttcttcagatgttttgaataatttcaaagatgaaaacgggcggttcttctcctctgcgggccaaacccatgtggaattgagaagcgtggtgattcttttcagagcttccgaccttgcatttcctgacgaaggagctatggacgatgctagaaaatttgcagaaccatatcttagagacgcacttgcaacaaaaatctcaaccaatacaaaactattcaaagagattgagtacgtggtggagtacccttggcacatgagtatcccacgctcagaagccagaagttatattgattcgtatgatgacgattatgtatgggagaggaagactctatatagaatgccatctttgagtaattcaaaatgtttagaattggcaaaattggacttcaatatcgtacaatctttgcatcaagaggagttgaagcttctaacaagatggtggaaggaatccggcatggcagatataaatttcactcgacaccgagtggcggaggtttatttttcatcagctacatttgaacccgaatattctgccactagaattgccttcacaaaaattggttgtttacaagtcctttttgatgatatggctgacatctttgcaacactagatgaattgaaaagtttcactgagggagtaaagagatgggatacatctttgctacatgagattccagagtgtatgcaaacttgctttaaagtttggttcaaattaattgaagaagtaaataatgatgtggttaaggtacaaggacgtgacatgctcgctcacataagaaaaccctgggagttgtacttcaattgttatgtacaagaaagggagtggcttgacgctgggtatataccaacttttgaagagtacttaaagacttatgctatatcagtaggccttggaccgtgtaccctacaaccaatactactaatgggtgagcttgtgaaagatgatgttgttgagaaagtgcactatccctcaaatatgtttgagcttgtatccttgagttggcgactaacaaacgacaccaaaacatatcaggctgaaaaggctcgaggacaacaagcctcaggcatagcatgctatatgaaggataatctaggagcaactgaggaagatgccatcaagcacatatgtcgtgttgttgaccgggccttgaaagaagcaagctttgaatatttcaaaccatccaatgatatcccaatgggttgcaagtcctttatttttaaccttagattgtgtgtccaaatcttttacaagtttatagatgggtacggaatcgccaatgaggagattaaggattatataagaaaagtttatattgatccaattcaagtatgatatatcatgtaaaacctttttttcataataaattgaattattattgtattggcaaaaaaaaaaaaaaaaaaaaaaaaaaaaaaaaaaaaaaaaaaaaaaaaaaaaaaaaa

SEQ ID NO: 4 - protein, 862 aa, Taxus wallichiana var. chinensis
MAQLSFNAALKMNALGNKAIHDPTNCRAKSEGQMMWVCSKSGRTRVKMSRGSGGPGPVVMMSSSTGTSKVVSETSSTIVDDIPRLSANYHGDLWHHNVIQTLETPFRESSTYQERADELVVKIKDMFNALGDGDISPSAYDTAWVARVATISSDGSEKPRFPQALNWVFNNQLQDGSWGIESHFSLCDRLLNTTNSVIALSVWKTGHSQVEQGTEFIAENLRLLNEEDELSPDFEIIFPALLQKAKALGINLPYDLPFIKYLSTTREARLTDVSAAADNIPANMLNALEGLEEVMDWKKIMRFQSKDGSFLSSPASTACVLMNTGDEKCFTFLNNLLVKFGGCVPCMYSIDLLERLSLVDNIEHLGIGRHFKQEIKVALDYVYRHWSERGIGWGRDSLVPDLNTTALGLRTLRTHGYDVSSDVLNNFKDENGRFFSSAGQTHVELRSVVILFRASDLAFPDEGAMDDARKFAEPYLRDALATKISTNTKLFKEIEYVVEYPWHMSIPRSEARSYIDSYDDDYVWERKTLYRMPSLSNSKCLELAKLDFNIVQSLHQEELKLLTRWWKESGMADINFTRHRVAEVYFSSATFEPEYSATRIAFTKIGCLQVLFDDMADIFATLDELKSFTEGVKRWDTSLLHEIPECMQTCFKVWFKLIEEVNNDVVKVQGRDMLAHIRKPWELYFNCYVQEREWLDAGYIPTFEEYLKTYAISVGLGPCTLQPILLMGELVKDDVVEKVHYPSNMFELVSLSWRLTNDTKTYQAEKARGQQASGIACYMKDNLGATEEDAIKHICRVVDRALKEASFEYFKPSNDIPMGCKSFIFNLRLCVQIFYKFIDGYGIANEEIKDYIRKVYIDPIQV

SEQ ID NO: 5 - DNA, 2589 bp, Taxus canadensis
atggctcagctctcatttaatgcagcgctgaagatgaatgcattagggaacaaggcaatccacgatccaacgaattgcagagccaaatctgagggccaaatgatgtgggtttgctccaaatcagggcgaaccagagtaaaaatgtcgagaggaagtggtggtcctggtcctgtcgtaatgatgagcagtagcactggcactagcaaggtggtttccgagacttccagtaccattgtggatgatatccctcgactctccgccaattatcatggcgatctgtggcaccacaatgttatacaaactctggagacaccatttcgtgagagttctacttaccaagaacgggcagatgagctggttgtgaaaattaaagatatgttcaatgcgctcggagacggagatatcagtccgtctgcatacgacactgcgtgggtggcgagggtggcgaccatttcctctgatggatctgagaagccacggtttcctcaggccctcaactgggttttcaacaaccagctccaggatggatcgtggggtatcgaatcgcactttagtttatgcgatcgattgcttaacacgaccaattctgttatcgccctctcggtttggaaaacagggcacagccaagtagaacaaggtactgagtttattgcagagaatctaagattactcaatgaggaagatgagctgtccccggatttcgaaataatctttcctgctctgctgcaaaaggcaaaagcgttggggatcaatcttccttacgatcttccatttatcaaatctttgtcgacaacacgggaagccaggcttacagatgtttctgcggcagcagacaatattccagccaacatgttgaatgcgttggagggtctcgaggaagttattgactggaacaagattatgaggtttcaaagtaaagatggatctttcctgagctcccctgcctccactgcctgtgtactgatgaatataggggacgaaaaatgtttcacttttctcaacaatctgctggacaaattcggcggctgcgtgccctgtatgtattccatcgatctgctggaacgcctttcgctggttgataacattgagcatctcggaatcggtcgccatttcaaacaagaaatcaaaggagctcttgattatgtctacagacattggagtgaaaggggcatcggttggggcagagacagcctcgttccagatctcaacacaacagccctcggcctgcgaactcttcgcacgcacggatacgatgtttcttcagatgttttgaataatttcaaagatgaaaacgggcggttcttctcctctgcgggccaaacccatgtcgaattgagaagcgtggtgaatcttttcagagcttccgaccttgcatttcctgacgaaggagttatggacgatgctagaaaatttgcagaaccatatcttagagacgcacttgcaacaaaaatctcaaccaatacaaaactattcaaagagattgagtacgtggtggagtacccttggcacatgagtatcccacgtctagaagccggaagttatattgattcatatgacgatgattatgtatggcagaggaagactctatacagaatgccatctttgagtaattcaaaatgtttagaattggcaaaattggacttcaatatcgtacaatctttgcatcaagaggagttgaagcttctaacaagatggtggaaggaatctggcatggcagatataaatttcactcgacaccgagtggcggaggtttatttttcatcagctacatttgaacccgaatattctgccactcgaattgccttcacaaaaattggttgtttacaagtcctttttgatgatatggctgacatctttgcaacactagatgaattgaaaagtttcactgagggagtaaagagatgggatacatctttgctacatgagattccagagtgtatgcaaacttgctttaaagtttggttcaaattgatggaagaagtaaataatgatgtggttaaggtacaaggacgtgacatgctcgctcacataagaaaaccctgggagttgtacttcaattgttatgtacaagaaagggagtggcttgaagctgggtatataccaacttttgaagagtacttaaagacttatgctatatcagtaggccttggaccgtgtaccctacaaccaatactactaatgggtgagcttgtgaaagatgatgttgttgagaaagtgcactatccctcaaatatgtttgagcttgtatccttgagctggcgactaacaaatgacaccaaaacatatcaggctgaaaaggctcgaggacaacaagcctcaggcatagcatgctatatgaaggataatccaggagcaactgaggaagatgccatcaagcacatatgtcgtgttgttgaccgagccttgaaagaagcaagctttgaatatttcaaaccatccaatgatatcccaatgggttgcaagtcctttatttttaaccttagattgtgtgtccaaatcttttacaagtttatagatgggtacggaatcgccaatgaggagattaaggattatataagaaaagtttatattgatccaattcaagtatga

SEQ ID NO: 6 - protein, 862 aa, Taxus canadensis
MAQLSFNAALKMNALGNKAIHDPTNCRAKSEGQMMWVCSKSGRTRVKMSRGSGGPGPVVMMSSSTGTSKVVSETSSTIVDDIPRLSANYHGDLWHHNVIQTLETPFRESSTYQERADELVVKIKDMFNALGDGDISPSAYDTAWVARVATISSDGSEKPRFPQALNWVFNNQLQDGSWGIESHFSLCDRLLNTTNSVIALSVWKTGHSQVEQGTEFIAENLRLLNEEDELSPDFEIIFPALLQKAKALGINLPYDLPFIKSLSTTREARLTDVSAAADNIPANMLNALEGLEEVIDWNKIMRFQSKDGSFLSSPASTACVLMNIGDEKCFTFLNNLLDKFGGCVPCMYSIDLLERLSLVDNIEHLGIGRHFKQEIKGALDYVYRHWSERGIGWGRDSLVPDLNTTALGLRTLRTHGYDVSSDVLNNFKDENGRFFSSAGQTHVELRSVVNLFRASDLAFPDEGVMDDARKFAEPYLRDALATKISTNTKLFKEIEYVVEYPWHMSIPRLEAGSYIDSYDDDYVWQRKTLYRMPSLSNSKCLELAKLDFNIVQSLHQEELKLLTRWWKESGMADINFTRHRVAEVYFSSATFEPEYSATRIAFTKIGCLQVLFDDMADIFATLDELKSFTEGVKRWDTSLLHEIPECMQTCFKVWFKLMEEVNNDVVKVQGRDMLAHIRKPWELYFNCYVQEREWLEAGYIPTFEEYLKTYAISVGLGPCTLQPILLMGELVKDDVVEKVHYPSNMFELVSLSWRLTNDTKTYQAEKARGQQASGIACYMKDNPGATEEDAIKHICRVVDRALKEASFEYFKPSNDIPMGCKSFIFNLRLCVQIFYKFIDGYGIANEEIKDYIRKVYIDPIQV

SEQ ID NO: 7 - DNA, 2586 bp, Artificial Sequence
  Synthetic construct, GenBank Accession No. AY364470
atggctcagctctcatttaatgcagcgctgaagatgaatgcattagggaacaaggcaatccacgatccaacgaattgcagagccaaatctgagggccaaatgatgtgggtttgctccaaatcagggcgaaccagagtaaaaatgtcgagaggaagtggtggtcctggtcctgtcgtaatgatgagcagtagcactggcactagcaaggtggtttccgagacttccagtaccattgtggatgatatccctcgactctccgccaattatcatggcgatctgtggcaccacaatgttatacaaactctggagacaccatttcgtgagagttctacttaccaagaacgggcagatgagctggttgtgaaaattaaagatatgttcaatgcgctcggagacggagatatcagtccgtctgcatacgacactgcgtgggtggcgagggtggcgaccatttcctctgatggatctgagaagccacggtttcctcaggccctcaactgggttttcaacaaccagctccaggatggatcgtggggtatcgaatcgcactttagtttatgcgatcgattgcttaacacgaccaattctgttatcgccctctcggtttggaaaacagggcatcagcaagtagaacaaggtactttgtttattacagagaatctaaaattactggagggggaagatgagttgcccccggactttgaaataatctttcctgctctgttgcaaaaggcaaaagcgctgggaatgagtcttcctgatcatgatcttcccttcatcaaatctttgtcggtagcacgggaagcgaggcttgcaagttacacagacaacaatattccagccagcatgttgaatgcgttggagggtctggaggaagttattgattgggacaagattatgaggttccaaagtaaggatggatctttcctgagctcccctgcttccactgcatgtgtactgatgcatacaggggacgaaagctgttttgcctttctcaacaatgtgctggacaaattcggcggctgcgtgccctgtttgtattcaatcgatctgcttgaacgcctttcgctggttgacaacactgagcatctcggaatcggtcgacatttcaaacaagaaatcaaggtagctcttgattatgtctacagacattggagtgaaagaggcatcggtttgggtagagacagcctaattcctgatctcaacactacagccctcggcctccgaacccttcgagcccatggatacagtgtttcctcggaggttttgaataatttcaaagatgaaaacgggcgcttcttctcctctcttggccaaacacatgtagaattgagaagcatggtgaaccttttgagagcttccgacctcgcatttcccgacgaaccacttatggacgatgctaaaatctttgcagaagcgtatcttagagacgcacttgcaacacgcatctcaaccaatacaaaattattcaaagagatcgagtatgcggtagagtacccttggcacatgagtatcccgcgtctcgaggcgagaagttatattgatgcatacgacgatgattatacatggcaaaataagactctatacagaatgtcaaaattgagtaacacatattgcttagaattggcgaaattggacttcaatattgtacaatctttgcatcaagaggagttgaagcttctaacaagatggtggaaagaatccggcatggcagatataaacttcactcgacaccgagtggcagaggtgtatttttcatcggctacatttgaacccgaatactcttctaccagaatcgccttcaccaaaattggttgtctacaagtcctctttgacgacatggccgacatctttgcaacgctagatgagttgagagatttcaccaagggagtaaagagatgggacacatctttgatacacaagctaccagaatgtatgcaaacttgctttagagtttggtttaacttaatggaagaagtcaataatgacgtgtcaaacgtacaaggccgtgacatgctcaatcacataagaaaaccctgggagttgtacttcaactgttatgtacaagaaagagagtggctcgatgctgggtatataccgactctagaggagtacctaaagacctattctatatcagtaggccttggaccatgtactctacaaccaatactactaatgggcgatatcgtgaaagatgatgttgtcgagaaagtgcactatccctcaaatctatttgaacttgtatccttgagctggcgattaacaaatgacacaaaaacatatcaggctgagaaggctcgaggacaacaagcctcaggcatagcgtgttatatgaaggataatccaggatcgacagaggaagatgccatcaagtacatatgcggagttgttgatcgagccttgaaagaggcatgctttgaatatttcaagccagccgatgatgtcccgatgagttgcaagtcctttattttcaacctcagactgtgtgtccaaatattttacaagtttatagatgggtatggaattgccaacgaggagattaaggactatataagaaaagtttacattgaaccgattcaagtatga

SEQ ID NO: 8 - protein, 861 aa, Artificial Sequence
  Synthetic construct
MAQLSFNAALKMNALGNKAIHDPTNCRAKSEGQMMWVCSKSGRTRVKMSRGSGGPGPVVMMSSSTGTSKVVSETSSTIVDDIPRLSANYHGDLWHHNVIQTLETPFRESSTYQERADELVVKIKDMFNALGDGDISPSAYDTAWVARVATISSDGSEKPRFPQALNWVFNNQLQDGSWGIESHFSLCDRLLNTTNSVIALSVWKTGHQQVEQGTLFITENLKLLEGEDELPPDFEIIFPALLQKAKALGMSLPDHDLPFIKSLSVAREARLASYTDNNIPASMLNALEGLEEVIDWDKIMRFQSKDGSFLSSPASTACVLMHTGDESCFAFLNNVLDKFGGCVPCLYSIDLLERLSLVDNTEHLGIGRHFKQEIKVALDYVYRHWSERGIGLGRDSLIPDLNTTALGLRTLRAHGYSVSSEVLNNFKDENGRFFSSLGQTHVELRSMVNLLRASDLAFPDEPLMDDAKIFAEAYLRDALATRISTNTKLFKEIEYAVEYPWHMSIPRLEARSYIDAYDDDYTWQNKTLYRMSKLSNTYCLELAKLDFNIVQSLHQEELKLLTRWWKESGMADINFTRHRVAEVYFSSATFEPEYSSTRIAFTKIGCLQVLFDDMADIFATLDELRDFTKGVKRWDTSLIHKLPECMQTCFRVWFNLMEEVNNDVSNVQGRDMLNHIRKPWELYFNCYVQEREWLDAGYIPTLEEYLKTYSISVGLGPCTLQPILLMGDIVKDDVVEKVHYPSNLFELVSLSWRLTNDTKTYQAEKARGQQASGIACYMKDNPGSTEEDAIKYICGVVDRALKEACFEYFKPADDVPMSCKSFIFNLRLCVQIFYKFIDGYGIANEEIKDYIRKVYIEPIQV

SEQ ID NO: 9 - DNA, 2743 bp, Taxus chinensis var. mairei
gtccaactcagcatttgatttggcatttggaatttggaattcgtaatttcagtacctagttcccctgcctctctgcagaaatggctcagctctcatttaatgcagcgctgaagatgaatgcattggggaacaaggcaatccacgatccaacgaattgcagagccaaatctgagggccaaatgatgtgggtttgctccaaatcagggcgacccagagtaaaaatgtcgagaggaagtggtggtcctggtcctgtcgtaatgatgagcagtagcactggcactagcaaggtggtttccgagacttccagtaccattgtggatgatatccctcgactctccgccaattatcatggcgatctgtggcaccacaatgttatacaaactctggagacaccatttcgtgagagttctacttaccaagaacgggcagatgagctggtggtgaaaattaaggatatgttcaatgcgctcggagacggagatatcagtccgtctgcatacgacactgcatgggtggcgagggtggcgaccatttcctctgatggatctgagaagccacggtttcctcaggccctcaactgggttttaaacaaccagctacaagatggatcatggggtatcgaatcgcactttagtttatgcgatcgattgcttaacacgatcaattctgttatcgtcctctcggtttggaaaacagggcacagccaagtagaacaaggtactgagtttattgcagagaatctaagattactcaatgaggaagatgagttgtccccggatttcgaaataatctttcctgctctgctgcaaaaggcaaaagcgttggggatcaatcttccttacgatcttccatttatcaaatatttgtcgacaacacgggaagccaggcttacagatgtttctgcggcagcagacaatattccagccaacatgttgaatgcgttggagggtcttgaggaagttattgactggaagaagattatgaggtttcgaagtaaagatggatctttcctgagctcccctgcctccactgcctgtgtactgatgaatacaggggacgaaaaatgtttcacttttctcaacaatctgctggacaaattcggcggctgcgtgccctgtatgtattccatcgatctgctggaacgcctttcgctggttgataacattgagcatctcggaatcggtcgccatttcaaacaagaaatcaaagtagctcttgattatgtctacagacattggagtgaaaggggcattggttggggcagagactgcctcgttccagatctcaacacaacagccctcggcctgcgaactcttcgcacgcacggatacgatgtttcttcagatgttttgaataatttcaaagatgaaaacgggcggttcttctcctctgcgggccaaacccatgtcgaattgagaagcgtggtgaatcttttcagagcttccgaccttgcatttcctgacgaaggagctatggacgatgctagaaaatttgcagaaccatatcttcgagacgcacttgcaacaaaaatctcaaccaatacaaaactattcaaagagattgagtacgtggtggagtacccttggcacatgagtatcccacgcctagaagccagaagttatattgactcgtatgatgacgattatgtatgggagaggaagactctatacagaatgccatctttgagtaattcaaaatgtttagaattggcaaaattggacttcaatatcgtacaatctttgcatcaagaggagttgaagcttctaacaagatggtggaaggaatccggcatggcagatataaatttcactcgacaccgagtggcggaggtttatttttcatcagctacatttgaacctgaatattctgccactagaattgccttcacaaaaattggttgtttacaagtcctttttgatgatatggctgacatctttgcaacactagatgaattgaaaagtttcactgagggagtaaagagatgggatacatctttgctacatgagatcccagagtgtatgcaaacttgctttaaagtttggttcaaattaatggaagaagtaaataatgatgtggttaaggtacaaggacgtgacatgctcgctcacataagaaaaccctgggagttgtacttcaattgttatgtacaagaaagggagtggcttgacgctgggtatataccaacttttgaagagtacttaaagacttatgctatatcagtaggccttggaccgtgtaccccacaaccaatactactaatgggtgagcttgtgaaagatgatgttgttgagaaagtgcactatccctcaaatatgtttgagcttgtatccttgagttggcgactaacaaacgacaccaaaacatatcaggctgaaaaggctagaggacaacaagcctcaggcatagcatgctatatgaaggataatccaggagcaactgaggaagatgccatcaagcacatatgtcgtgttgttgaccgggccttgaaagaagcaagctttgaatatttcaaaccatccaatgatatcccaatgggttgcaagtcctttatttttaaccttagattgtgtgtccaaatcttttacaagtttatagatgggtacggaatcgccaatgaggagattaaggattatataagaaaagtttatattgatccaattcaagtatgatatatcatgtaaaacctttttttcataataaattgacttattattgtattggcaaaaaaaaaaaaaaaaaaaaa

SEQ ID NO: 10 - protein, 862 aa, Taxus chinensis var. mairei
MAQLSFNAALKMNALGNKAIHDPTNCRAKSEGQMMWVCSKSGRPRVKMSRGSGGPGPVVMMSSSTGTSKVVSETSSTIVDDIPRLSANYHGDLWHHNVIQTLETPFRESSTYQERADELVVKIKDMFNALGDGDISPSAYDTAWVARVATISSDGSEKPRFPQALNWVLNNQLQDGSWGIESHFSLCDRLLNTINSVIVLSVWKTGHSQVEQGTEFIAENLRLLNEEDELSPDFEIIFPALLQKAKALGINLPYDLPFIKYLSTTREARLTDVSAAADNIPANMLNALEGLEEVIDWKKIMRFRSKDGSFLSSPASTACVLMNTGDEKCFTFLNNLLDKFGGCVPCMYSIDLLERLSLVDNIEHLGIGRHFKQEIKVALDYVYRHWSERGIGWGRDCLVPDLNTTALGLRTLRTHGYDVSSDVLNNFKDENGRFFSSAGQTHVELRSVVNLFRASDLAFPDEGAMDDARKFAEPYLRDALATKISTNTKLFKEIEYVVEYPWHMSIPRLEARSYIDSYDDDYVWERKTLYRMPSLSNSKCLELAKLDFNIVQSLHQEELKLLTRWWKESGMADINFTRHRVAEVYFSSATFEPEYSATRIAFTKIGCLQVLFDDMADIFATLDELKSFTEGVKRWDTSLLHEIPECMQTCFKVWFKLMEEVNNDVVKVQGRDMLAHIRKPWELYFNCYVQEREWLDAGYIPTFEEYLKTYAISVGLGPCTPQPILLMGELVKDDVVEKVHYPSNMFELVSLSWRLTNDTKTYQAEKARGQQASGIACYMKDNPGATEEDAIKHICRVVDRALKEASFEYFKPSNDIPMGCKSFIFNLRLCVQIFYKFIDGYGIANEEIKDYIRKVYIDPIQV

SEQ ID NO: 11 - DNA, 3990 bp, Taxus cuspidata
atggctcagctctcatttaatgcagcgctgaagatgaatgcattagggaacagggcaatccacaatccaacgaattgcagagccaaatctgagggccaaatgatgtgggtttgctccaaatcagggcgaaccagagtaaaaatgtcgagaggaagtggtggtcctggtcctgtcgtaatgatgagcagtagcactggcactagcaaggtggtttccgagacttccagtaccattgtggatgatatccctcgactctccgccaattatcatggcgatctgtggcaccacaatgttatacaaactctggagacaccatttcgtgaggtagggaaaagtagaaaacagtttaaacggatttaatgggtagatttagtccttcatatttgttggctgacatttctgtgaactgcagagttctacttaccaagaacgggcagatgagctggttgtgaaaattaaagatatgttcaatgcgctcggagacggagatatcagtccgtctgcatacgacactgcgtgggtggcgagggcggcgaccatttcctctgatggatctgagaagccacggtttcctcaggccctcaactgggttttcaacaaccagctccaagatggatcatggggtatcgaatcgcactttagtttatgcgatcgattgcttaacacgagcaattctgttatcgccctctcggtttggaaaacagggcacagccaagtagaacaaggttagaatcatggcattttgggaaaaaaaaacagtgttgaaggtttactggtcaatcaactaatgttttgtttctcattttttggggtggatttatcattggttggttgatcagtcagccttgcaaacatatgtgatgtttaagcgccaaatctgttgtctcattatttttctatttttttctccacaggtactgagtttattgcagagaatctaagattactcaatgaggaagatgagctgtccccggatttcgaaataatctttcctgctctgctgcaaaaggcaaaagcgttggggatcaatcttccttacgatcttccatttatcaaatctttgtcgacaacacgggaagccaggcttacagagtgagtgaaaactctgttactgtttttaaaaaaaaaaaactggtaatcatgttctggatttgtaatttgttctttttggccattgcagtgtttctgcggcagcagacaatattccagccaacatgttgaatgcgttggagggtctcgaggaagttattgactggaacaagattatgaggtttcaaagtaaagatggatctttcctgagctcccctgcctccactgcctgtgtactgatgaatacaggggacgaaaaatgtttcacttttctcaacaatctgctggacaaattcggcggctgcggtatgatttgttttttaacaagaaattctttgtgtgcgtgctgattccaacaatgcattcaagtgattaaattaaatgttacgaactgtgaattacagtgccctgtatgtattccatcgatctgctggaacgcctttcgctggttgataacattgagcatctcggaatcggtcgccatttcaaacaagaaatcaaaggagctcttgattatgtctacaggtaaccactgtttcttcttctaacactcgattttctctcttttcctttccctacttgatataatacttgctggaaatgggcagacattggagtgaaaggggcatcggttggggcagagacagcctcgttccagatctcaacacaacagccctcggcctgcgaactcttcgcacgcacggatacgatgtttcttcaggtcagaagatcagaaataatgaaaataaaagaaactggttttactgtctcataggctattcttttagcctcgtggacgccaaaaagttttcatttcatttcatttgcttttatcagatctcaagactgttaaattgtttgccttttgtaaaaattctttgtgctgatatggaaacaaaatatgaaagcagatgttttgaataatttcaaagatgaaaacgggcggttcttctcctctgcgggccaaacccatgtcgaattgagaagcgtggtgaatcttttcagagcttccgaccttgcatttcctgacgaaggagctatggacgatgctagaaaatttgcagaaccatatcttagagacgcacttgcaacaaaaatctcaaccaatacaaaactattcaaagaggttagtacaatatatttttattaacaaaaatatatcaataattctaccaacataattaggagtaaacctaaagttttctattatatgtagttagaaatcaaggtttctctaatatgatggatcatttcagattgagtacgtggtggagtacccttggcacatgagtatcccacgcctagaagccagaagttatattgattcgtatgacgacgattatgtatggcagaggaagactctatacaggtgagttcaaatataatcacattacccttcaattttatatagaatttatgagcccttgttgtatcgattgctatcttttctcaatactgaggttataatccgtgcaacagaatgccatctttgagtaattcaaaatgtttagaattggcaaaattggacttcaatatcgtacaatctttgcatcaagaggagttgaagcttctaacaaggtgggtgataaattgtcataccttctcaatttattcaaaacccaattttttggggaggagaacatgaagtaataatctactaacattatggttttttggtcataagatggtggaaggaatccggcatggcagatataaatttcactcgacaccgagtggcggaggtttatttttcatcagctacatttgaacctgaatattctgccactagaattgccttcacaaaaattggttgtttacaagtcctttttgatgatatggctgacatctttgcaacactagatgaattgaaaagtttcactgagggagtaaagaggtgattctttaatttaccaaattttttaatctttaaacattgaaatcttgtaataacatatacataataggacctaactgaacattgtggtaacttttagatgggatacatctttgctacatgagattccagagtgtatgcaaacttgctttaaagtttggttcaaattaatggaagaagtaaataatgatgtggttaaggtacaaggacgtgacatgctcgctcacataagaaaacctgtaagtaattcaaattttaaatgcaacacaattgagaatttttatagtttagatgcatttctttttaaggtaaaaacaccattggtactcacaaaaacatcgtgtatgattggaatagtgggagttgtacttcaattgttatgtacaagaaagggagtggcttgaagctgggtatataccaacttttgaagagtacttaaagacttatgctatatcagtaggccttggaccatgtaccctacaaccaatactactaatgggtgagcttgtgaaagatgatgttgttgagaaagtgcactatccctcaaatatgtttgagcttgtatccttgagctggcgactaacaaacgacaccaaaacatatcaggtgcattttgaatataattttttttctatatatagaaacatgccactaaatgtcttccataatatgctaaccctatttatgtttcttacttggtgaaggctgaaaaggctcgaggacaacaagcctcaggcatagcatgctatatgaaggataatccaggagcaactgaggaagatgccatcaagcacatatgtcgtgttgttgaccgggccttgaaagaagcaagctttgaatatttcaaaccatccaatgatatcccaatgggttgcaagtcctttatttttaaccttagattgtgtgtccaaatcttttacaagtttatagatgggtacggaattgccaatgaggagattaaggattatataagaaaagtttatattgatccaattcaagtatgatat

SEQ ID NO: 12 - protein, 862 aa, Taxus cuspidata
MAQLSFNAALKMNALGNRAIHNPTNCRAKSEGQMMWVCSKSGRTRVKMSRGSGGPGPVVMMSSSTGTSKVVSETSSTIVDDIPRLSANYHGDLWHHNVIQTLETPFRESSTYQERADELVVKIKDMFNALGDGDISPSAYDTAWVARAATISSDGSEKPRFPQALNWVFNNQLQDGSWGIESHFSLCDRLLNTSNSVIALSVWKTGHSQVEQGTEFIAENLRLLNEEDELSPDFEIIFPALLQKAKALGINLPYDLPFIKSLSTTREARLTDVSAAADNIPANMLNALEGLEEVIDWNKIMRFQSKDGSFLSSPASTACVLMNTGDEKCFTFLNNLLDKFGGCVPCMYSIDLLERLSLVDNIEHLGIGRHFKQEIKGALDYVYRHWSERGIGWGRDSLVPDLNTTALGLRTLRTHGYDVSSDVLNNFKDENGRFFSSAGQTHVELRSVVNLFRASDLAFPDEGAMDDARKFAEPYLRDALATKISTNTKLFKEIEYVVEYPWHMSIPRLEARSYIDSYDDDYVWQRKTLYRMPSLSNSKCLELAKLDFNIVQSLHQEELKLLTRWWKESGMADINFTRHRVAEVYFSSATFEPEYSATRIAFTKIGCLQVLFDDMADIFATLDELKSFTEGVKRWDTSLLHEIPECMQTCFKVWFKLMEEVNNDVVKVQGRDMLAHIRKPWELYFNCYVQEREWLEAGYIPTFEEYLKTYAISVGLGPCTLQPILLMGELVKDDVVEKVHYPSNMFELVSLSWRLTNDTKTYQAEKARGQQASGIACYMKDNPGATEEDAIKHICRVVDRALKEASFEYFKPSNDIPMGCKSFIFNLRLCVQIFYKFIDGYGIANEEIKDYIRKVYIDPIQV

SEQ ID NO: 13 - DNA, 3987 bp, Taxus wallichiana var. mairei
atggctcagctctcatttaatgcagcgctgaagatgaatgcattggggaacaaggcaatccacgatccaacgaattgcagagccaaatctgagggccaaatgatgtgggtttgctccaaatcagggcgaaccagagtaaaaatgtcgagaggaagtggtggtcctggtcctgtcgtaatgatgagcagtagcactggcactagcaaggtggtttccgagactgccagtaccattgtggatgatatccctcgactctccgccaattatcatggcgatctgtggcaccacaatgttatacaaactctggagacaccatttcgtgaggtagggaaaagtagaaaacagtttaaacggatttaatgggtagatttagtcgttcatatttgttggctgacatttctgtgaactgcagagttctacttaccaagaacgggcagatgagctggtagtgcaaattaaagatatgttcaatgcgctcggagacggagatatcagtccgtctgcatacgacactgcgcgggtggcgagggtggcgaccatttcctctgatggatctgagaagccacggtttcctcaggccctcaactgggttttaaacaaccagctacaagatggatcatggggtatcgaatcgcactttagtttatgcgatcgattgcttaacacgatcaattctgttatcgccctctcggtttggaaaacagggcacagccaagtagaacaaggtcagaatcatggcattttgggaaaaaaaaaacagtgttgaaggttgactggtcaatcaattaatgttttgctcatcattttttggggcggatttatcattggttggttgaccagtcagccttgcaaacatatgtgatatttaagcgccaaatctgttgtctcattatttttctgtttttttctccacaggtactgagtttattgcagagaatctaagattactcaatgaggaagatgagttgtccccggatttcgaaataatctttcctgctctgctgcaaaaggcaaaagcgttggggatcaatcttccttacgatcttccatttatcaaatatttgtcgacaacacgggaagccaggcttacagagtgagtgaaaactctgctactgttttaaaaaaaaaaactggtcatcatgttctggatttccaatttgttctttttggccattgcagtgtttctgcggcagcagacaatattccagccaacatgttgaatgcgttggggggtcttgaggaagttgttgactggaagaagattatgaggtttcaaagtaaagatggatctttcctgagctcccctgcctccactgcctgtgtactgatgaatacaggggacgaaaaatgtttcactgttctcaacaatctgctggacaaattcggcggctgcggtatgattcgttttttaacaagaaattctttgtgtgcgtgctgattccaacaatgcattcaagtgattaaattaaatgttacgaactgtgaattacagtgccctgtatgtattccatcgatctgctggaacgcctttcgctggttgataacattgagcatctcggaatcggtcgccatttcaaacaagaaatcaaagtagctcttgattatgcctacaggtaaccactgtttcttcttctaacacccgattttctctcttttcctttccctacttgatgtaatatttgctggaaatgggcagacattggagtgaaaggggcattggttggggcagagacagcctcgttccagatctcaacacaacagccctcggcctgcgaactcttcgcacgcacggatacgatgtttcttcaggtcagaagatcagaaataatgaaaataaaagaaactggttttacggtctcataggttattcttttagcttcgtggacgtcaaaaagttttcatttcatttcatttgcttttgtcagatctcaagactgttaaattgtttgccatttgtaaaaattctttgtgctgatatggaaacaaaaatatgaaagcagatgttttgaataatttcaaagatgaaaacgggcggttcttctcctctgcgggccaaacccatgtcgaattgagaagcgtggtgaatcttttcagagcttccgaccttgcatttcctgacgaaggagctatggacgatgctagaaaatttgcagaaccatatcttcgagacgcacttgcaacaaaaatctcaaccaatacaaaactattcaaagaggttagtacaatttatttttattaacaaaaacatatcaataattctaccaacataattaggagtaaacctaaagttttctattatatgtagttagaaatcaaggtctctctaatatgatggatcatttcagattgagtacgtggtggagtacccttggcacatgagtatcccacgcctagaagccagaagttatattgattcgtatgacgacgattatgtatggcagaggaagactttatacaggtgagttcaaatataatcacgttacccttcaattttatatagaatttatgaaccgttgttgtatcgattgctatcttttctcagtactgaggttataatccgtgcaacagaatgccatctttaagtaattcaaaatgtttagaattggcaaaattggacttcaatatcgtacaatctttgcatcaagaggagttgaagcttccaacaaggtgggtgataaattgtcataccttctcaatttattcaaaacctaattttttggggaggagaacatgaagtaataatctaccaacattatggttttttggtcataagatggtggaaggaatccggcatggcagatataaatttcactcgacaccgagtggcggaggtttatttttcatcagctacatttgaacccgagtattccaccactagaattgccttcacaaaaattggttgtttacaagtcctttttgatgatatggctgacatctttgcaacactagatgaattgaaaagtttcactgagggagtaaagaggtgattctttaatttaccaaattttttaatctttaaacattgaaatcttgtaataacatatacataataggacctaactgaacattgtggtaacttttagatgggatacatctttgctacatgagattccagagtgtatgcaaacttgctttaaagtttggttcaaattaatggaagaagtaaataatgatgtggttaaggtacaaggacgtgacatgctcgctcacataagaaaacccgtaagtaattcaaattttaaatgcaacacaattgagaatttttatagtttagacgcatttctttttaaggtaaaaacaccattggtactcacaaaaacatcgtgtatgattggaatagtgggagttgtacttcaattgttatgtacaagaaagggagtggcttgaagctgggtatataccaacttttgaagagtacttaaagacttatgctatatcagtaggccttggaccgtgtaccctacaaccaatactactaatgggtgagcttgtaaaagatgatgttgttgagaaagtgcactatccctcaaatatgtttgagcttgtatccttgagctggcgactaacaaacgacaccaaaacatatcaggtgcattttgaatatatatttttttctatatatagaaacatgccactaaatgtcttccataatatgctaaccctatttatgtttcttacttggtgaaggctgaaaaggctcgaggacaacaagcctcaggcatagcatgctatatgaaggataatccaggagcaactgaggaagatgccatcaagcacatatgtcgtgttgttgaccgagccttgaaagaagcaagctttgaatatttcaaaccatccaatgatatcccaatgggttgcaagtcctttatttttaacctcagattgtgtgtccaaatcttttacaagtttatagatggatacggaatcgccaatgaggagattaaggattatataagaaaagtttatattgatccaattcaagtatga

SEQ ID NO: 14 - protein, 862 aa, Taxus wallichiana var. mairei
MAQLSFNAALKMNALGNKAIHDPTNCRAKSEGQMMWVCSKSGRTRVKMSRGSGGPGPVVMMSSSTGTSKVVSETASTIVDDIPRLSANYHGDLWHHNVIQTLETPFRESSTYQERADELVVQIKDMFNALGDGDISPSAYDTARVARVATISSDGSEKPRFPQALNWVLNNQLQDGSWGIESHFSLCDRLLNTINSVIALSVWKTGHSQVEQGTEFIAENLRLLNEEDELSPDFEIIFPALLQKAKALGINLPYDLPFIKYLSTTREARLTDVSAAADNIPANMLNALGGLEEVVDWKKIMRFQSKDGSFLSSPASTACVLMNTGDEKCFTVLNNLLDKFGGCVPCMYSIDLLERLSLVDNIEHLGIGRHFKQEIKVALDYAYRHWSERGIGWGRDSLVPDLNTTALGLRTLRTHGYDVSSDVLNNFKDENGRFFSSAGQTHVELRSVVNLFRASDLAFPDEGAMDDARKFAEPYLRDALATKISTNTKLFKEIEYVVEYPWHMSIPRLEARSYIDSYDDDYVWQRKTLYRMPSLSNSKCLELAKLDFNIVQSLHQEELKLPTRWWKESGMADINFTRHRVAEVYFSSATFEPEYSTTRIAFTKIGCLQVLFDDMADIFATLDELKSFTEGVKRWDTSLLHEIPECMQTCFKVWFKLMEEVNNDVVKVQGRDMLAHIRKPWELYFNCYVQEREWLEAGYIPTFEEYLKTYAISVGLGPCTLQPILLMGELVKDDVVEKVHYPSNMFELVSLSWRLTNDTKTYQAEKARGQQASGIACYMKDNPGATEEDAIKHICRVVDRALKEASFEYFKPSNDIPMGCKSFIFNLRLCVQIFYKFIDGYGIANEEIKDYIRKVYIDPIQV

SEQ ID NO: 15 - DNA, 2589 bp, Taxus wallichiana var. mairei
atggctcagctctcatttaatgcagcgctgaagatgaatgcattggggaacaaggcaatccacgatccaacgaattgcagagccaaatctgagggccaaatgatgtgggtttgctccaaatcagggcgaaccagagtaaatatgtcgagaggaagtggtggtcctggtcctgtcgtaatgatgagcagtagcactggcactagcaaggcggtttccgagacttccagtaccattgtggatgatatccctcgactctccgccaattatcatggcgatctgtggcaccacaatgttatacaaactctggagacaccatttcgtgagagttctacttaccaagaacgggcagatgagctggttgtgaaaattaaagatatgttcaatgcgctcggagacggagatatcagtccgtctgcatacgacactgcgtgggtggcgagggtggcgaccatttcctctgatggatctgagaagccacggtttcctcaggccctcaactgggttttaaacaaccagctacaagacggatcatggggtatcgaatcgcactttagtttatgcgatcgattgcttaacacgatcaattctgttatcgctctctcggtttggaaaacagggcacagccaagtagaacaaggtactgagtttattgcagagaatctaagattactcaatgaggaagatgagttgtccccggatttcgaaataatctttcctgctctgctgcaaaaggcaaaatcgttggggatcaatcttccttacgatcttccatttatcaaatatttgtcgacaacacgggaagccaggcttacagatgtttctgcggcagcagacaatattccagccaacatgttgaatgcgttggagggtcttgaggaagttattgactggaagaagattatgaggtttcaaagtaaagatggatcttccctgagctcccctgcctccactgcctgtgtactgatgaatacaggggacgaaaaatgtttcacttttctcaacaatctgctggacaaattcggcggctgcgtgccctgtatgtattccatcgatctgctggaacgcctttcgctggttgataacattgagcatctcggaatcggtcgccatttcaaacaagaaatcaaagtagctcttgattatgtctacagacattggagtgaaaggggcatcggttggggcagagacagcctcgttccagatctcaacacaacagccctcggcctgcgaactcttcgcacgcacggatacgatgtttcttcagatgttttgaataatttcaaagatgaaaacgggcggttcttctcctctgcgggccaaacccatgtcgaattgagaagcgtggtgaatcttttcagagcttccgaccttgcatttcctgacgaaggagctatggacgatgctagaaaatttgcagaaccatatcttagagacgcacttgcaacaaaaatctcaaccaatacaaaactattcaaagagattgagtacgtggtggagtacccttggcacatgagtatcccacgcctagaagccagaagttatattgattcgtatgatgacgattatgtatgggagaggaagactctatacagaatgccatctttgagtaattcaaaatgtttagaattggcaaaattggacttcaatatcgtacaatctttgcatcaagaggagttgaagcttctaacaagatggtggaaggaatccggcatggcagatataaatttcactcgacaccgagtggcggaggtttatttttcatcagctacatttgaacctgaatattctgccactagaattgccttcacaaaaattggttgtttacaagtcctttttgatgatatggctgacatctttgcaacactagatgaattgaaaagtttcactgagggggtaaagagatgggatacatctttgctacatgagattccagagtgtatgcaaacttgctttaaagtttggttcaaattaatggaagaagtaaataatgatgtggttaaggtacaaggacgtgacatgctcgctcacataagaaaaccctgggagttgtacttcaattgttatgtacaagaaagggagtggcttgacgctgggtatataccaacttttgaagagtacttaaagacttatgctatatcagtaggccttggaccgtgtaccctacaaccaatactactaatgggtgagcttgtgaaagatgatgttgttgagaaagtgcactatccctcaaatatgtttgagcttgtatccttgagttggcgactaacaaacgacaccaaaacatatcaggctgaaaaggctagaggacaacaagcctcaggcatagcatgctatatgaaggataatccaggagcaactgaggaagatgccatcaagcacatatgtcgtgttgttgaccgggccttgaaagaagcaagctttgaatatttcaaaccatccaatgatatcccaatgggttgcaagtcctttatttttaaccttagattgtgtgtccaaatcttttacaagtttatagatgggtacggaatcgccaatgaggagattaaggattatataagaaaagtttatattgatccaattcaagtatga

SEQ ID NO: 16 - protein, 862 aa, Taxus wallichiana var. mairei
MAQLSFNAALKMNALGNKAIHDPTNCRAKSEGQMMWVCSKSGRTRVNMSRGSGGPGPVVMMSSSTGTSKAVSETSSTIVDDIPRLSANYHGDLWHHNVIQTLETPFRESSTYQERADELVVKIKDMFNALGDGDISPSAYDTAWVARVATISSDGSEKPRFPQALNWVLNNQLQDGSWGIESHFSLCDRLLNTINSVIALSVWKTGHSQVEQGTEFIAENLRLLNEEDELSPDFEIIFPALLQKAKSLGINLPYDLPFIKYLSTTREARLTDVSAAADNIPANMLNALEGLEEVIDWKKIMRFQSKDGSSLSSPASTACVLMNTGDEKCFTFLNNLLDKFGGCVPCMYSIDLLERLSLVDNIEHLGIGRHFKQEIKVALDYVYRHWSERGIGWGRDSLVPDLNTTALGLRTLRTHGYDVSSDVLNNFKDENGRFFSSAGQTHVELRSVVNLFRASDLAFPDEGAMDDARKFAEPYLRDALATKISTNTKLFKEIEYVVEYPWHMSIPRLEARSYIDSYDDDYVWERKTLYRMPSLSNSKCLELAKLDFNIVQSLHQEELKLLTRWWKESGMADINFTRHRVAEVYFSSATFEPEYSATRIAFTKIGCLQVLFDDMADIFATLDELKSFTEGVKRWDTSLLHEIPECMQTCFKVWFKLMEEVNNDVVKVQGRDMLAHIRKPWELYFNCYVQEREWLDAGYIPTFEEYLKTYAISVGLGPCTLQPILLMGELVKDDVVEKVHYPSNMFELVSLSWRLTNDTKTYQAEKARGQQASGIACYMKDNPGATEEDAIKHICRVVDRALKEASFEYFKPSNDIPMGCKSFIFNLRLCVQIFYKFIDGYGIANEEIKDYIRKVYIDPIQV

SEQ ID NO: 17 - DNA, 2738 bp, Taxus x media
ggtgtccaactcagcatttgatttggcatttgcaatttggaactcgtaatttcagtagttcccctgcctctctgcagaaatggctcagctctcatttaatgcagcgctgaagatgaatgcattggggaacaaggcaatccacgatccaacgaattgcagagccaaatctgaggggcaaatgatgtgggtttgctccaaatcagggcgaaccagagtaaaaatgtcgagaggaagtggtggtcctggtcctgtcgtaatgatgagcagtagcactggcactagcaaggtggtttccgagacttccagtaccattgtggatgatatccctcgactctccgccaattatcatggcgatctgtggcaccacaatgttatacaaactctggagacaccatttcgtgagagttctactttccaagaacgggcagacgagctggttgtgaaaattaaagatatgttcaatgcgctcggagacggagatatcagtccgtctgcatacgacactgcgtgggtggcgagggtggcgaccgtttcctctgatggatctgagaagccacggtttcctcaggccctcaactgggttttaaacaaccagctccaagatggatcatggggtatcgaatcgcactttagtttatgcgatcgattgcttaacacggtcaattctgttatcgccctctcggtttggaaaacagggcacagccaagtagaacaaggtactgagtttattgcagagaatctaagattactcaatgaggaagatgagttgtccccggatttcgaaataatctttcctgctctgctgcaaaaggcaaaagcgttggggatcaatcttccttacgatcttccatttatcaaatctttgtcgacaacacgggaagccaggcttacagatgtttctgcggtagcagacaatattccagccaacatgttgaatgcgttggagggtctggaggaagttattgattggaacaagattatgaggtttcaaagtaaagatggatctttcctgagctcccctgcctccactgcctgtgtactgatgaatacaggggacgaaaaatgtttcactcttctcaacaatctgctggacaaattcggcggctgcgtgccctgtatgtattccatcgatctgctggaacgcctttcgctggttgataacattgagcatctcggaatcggtcgccatttcaaacaagaaatcaaagtagctcttgattatgtctacagacattggagtgaaaggggcatcggttggggcagagacagccttgttccagatctcaacacaacagccctcggcctgcgaactcttcgcacgcacggatacgatgtttcttcagatgttttgaataatttcaaagatgaaaacgggcggttcttctcctctgcgggccaaacccatgtcgaattgagaagcgtggtgaatcttttcagagcttccgaccttgcatttcctgacgaaggagctatggacgatgctagaaaatttgcagaaccatatcttagagacgcacttgcaacgaaaatctcaaccaatacaaaactatacaaagagattgagtacgtggtggagtacccttggcacatgagtatcccacgcctagaagccagaagttatattgattcgtatgacgacgattatgtatggcagaggaagactttatacagaatgccatctttgagtaattcaaaatgtttagaattggcaaaattggacttcaatatcgtacaatctttgcatcaagaggagttgaagcttctaacaagatggtggaaggaatctggcatggcagatataaatttcactcgacaccgagtggcggaggtttatttttcatcagctacatttgaacccgaatattctgccactagaattgctttcacaaaaattggttgtttacaagtcctttttgatgatatggctgacatctttgcaacactagatgaattgaaaagtttcactgagggagtaaagagatgggatacatctttgctacatgagattccagagtgtatgcaaacttgctttaaagtttggttcaaattaatggaagaagtaaataatgatgtggttaaggtacaaggacgtgacatgctcgctcacataagaaaaccctgggagttgtacttcaattgttatgtacaagaaagggagtggcttgaagctgggtatataccaacctttgaagagtacttaaagacttatgctatatcagtaggccttggaccgtgtaccctacaaccaatactactgatgggtgagcttgtgaaagatgatgttgttgagaaagtgcactatccctcaaatatgtttgagcttgtatccttgagctggcgactaacaaacgacaccaaaacatatcaggctgaaaaggctcgaggacaacaagcctcaggcatagcatgctatatgaaggataatccaggagcaactgaggaagatgccatcaagcacatatgtcgtgttgttgaccgggccttgaaagaagcaagctttgaatatttcaaaccatccaatgatatcccaatgggttgcaagtcctttatttttaaccttagattgtgtgtccaaatcttttacaagtttatagatgggtacggaatcgccaatgaggagattaaggattatataagaaaagtttatattgatccaattcaagtatgatatatcatgtaaaacctctttttcataataaattgacttattattgtattggcaaaaaaaaaaaaaaaaa

SEQ ID NO: 18 - protein, 862 aa, Taxus x media
MAQLSFNAALKMNALGNKAIHDPTNCRAKSEGQMMWVCSKSGRTRVKMSRGSGGPGPVVMMSSSTGTSKVVSETSSTIVDDIPRLSANYHGDLWHHNVIQTLETPFRESSTFQERADELVVKIKDMFNALGDGDISPSAYDTAWVARVATVSSDGSEKPRFPQALNWVLNNQLQDGSWGIESHFSLCDRLLNTVNSVIALSVWKTGHSQVEQGTEFIAENLRLLNEEDELSPDFEIIFPALLQKAKALGINLPYDLPFIKSLSTTREARLTDVSAVADNIPANMLNALEGLEEVIDWNKIMRFQSKDGSFLSSPASTACVLMNTGDEKCFTLLNNLLDKFGGCVPCMYSIDLLERLSLVDNIEHLGIGRHFKQEIKVALDYVYRHWSERGIGWGRDSLVPDLNTTALGLRTLRTHGYDVSSDVLNNFKDENGRFFSSAGQTHVELRSVVNLFRASDLAFPDEGAMDDARKFAEPYLRDALATKISTNTKLYKEIEYVVEYPWHMSIPRLEARSYIDSYDDDYVWQRKTLYRMPSLSNSKCLELAKLDFNIVQSLHQEELKLLTRWWKESGMADINFTRHRVAEVYFSSATFEPEYSATRIAFTKIGCLQVLFDDMADIFATLDELKSFTEGVKRWDTSLLHEIPECMQTCFKVWFKLMEEVNNDVVKVQGRDMLAHIRKPWELYFNCYVQEREWLEAGYIPTFEEYLKTYAISVGLGPCTLQPILLMGELVKDDVVEKVHYPSNMFELVSLSWRLTNDTKTYQAEKARGQQASGIACYMKDNPGATEEDAIKHICRVVDRALKEASFEYFKPSNDIPMGCKSFIFNLRLCVQIFYKFIDGYGIANEEIKDYIRKVYIDPIQV

SEQ ID NO: 19 - DNA, 1687 bp, Taxus cuspidata
cggcaccaggttttctgctcctgcttttcttcttccaaaatggacgccctgtataagagcacagttgcaaaatttaatgaggtcacacagctggactgttccactgaatctttttccattgccctctcagctattgctggtattcttctgcttctcctgctcttccgttctaaacgccactcctcccttaaacttcctcctgggaaattaggcatccctttcattggcgagtcgtttatcttcctgagggctcttcgatcgaactcgctggagcaattttttgacgagagagtgaagaaattcggcctcgtgttcaagacctccttgattgggcatcccacagtagtactctgcggccctgcgggaaaccggcttattctgtccaacgaggagaagctggtgcagatgtcgtggcccgctcaatttatgaagctcatgggggagaattccgttgccaccaggaggggtgaagaccatatagttatgcgctctgctcttgcaggttttttcggccctggtgcgctgcagagttacattggtaaaatgaatacagagatccagagtcatatcaacgaaaaatggaagggaaaagatgaggtgaatgtacttcctttggtaagagagctcgtcttcaacatttcggccatcttgtttttcaacatatatgataagcaggaacaggatcgtctgcataagcttttggaaactattctggtcggaagttttgctcttccgattgacttgcccggatttggtttccatagagcactccagggacgggccaagctcaacaaaattatgctgtctttaattaaaaagagaaaagaagatctgcagtctggatcggcaacagccacgcaggatctgctctctgttttgctcactttcagagatgacaaagggactccactcaccaatgatgagatactcgacaacttttcttctctgctccatgcctcctatgacaccaccacttcgccaatggctttgattttcaagctcttgtcttccaatccagaatgctatcaaaaagtagttcaagagcaattggagatactttccaacaaagaggagggcgaagaaatcacatggaaggatctcaaagccatgaaatacacatggcaagtagctcaggaaacgctgcggatgtttcctccagttttcggaacatttcgcaaggccatcactgacattcagtatgatggttacacaattccaaaagggtggaagctgttgtggacaacttacagtacacatcccaaggacttgtatttcaatgaaccagagaaattcatgccttcaagattcgatcaggaaggaaagcatgtagctccttacacatttttgcccttcggtggaggccaacggtcatgtgtgggatgggaattttcaaagatggagatattactattcgttcatcattttgtcaaaacttttagcagctacaccccagttgatcccgacgaaaaaatatcaggggatccactccctcctcttccttccaagggattttccattaaactgtttccgagaccatagtcaattgaaggagaaaaccacagtgcagaactgctattcttgaatcctcgctcaagaataatacaaacatgcatcaccaacaatgtttatgcactcaatgcaaattaacagtgtgtcagcattgacagtcaaaaaaaaaaaaaaaaaa

SEQ ID NO: 20 - protein, 499 aa, Taxus cuspidata
MDALYKSTVAKFNEVTQLDCSTESFSIALSAIAGILLLLLLFRSKRHSSLKLPPGKLGIPFIGESFIFLRALRSNSLEQFFDERVKKFGLVFKTSLIGHPTVVLCGPAGNRLILSNEEKLVQMSWPAQFMKLMGENSVATRRGEDHIVMRSALAGFFGPGALQSYIGKMNTEIQSHINEKWKGKDEVNVLPLVRELVFNISAILFFNIYDKQEQDRLHKLLETILVGSFALPIDLPGFGFHRALQGRAKLNKIMLSLIKKRKEDLQSGSATATQDLLSVLLTFRDDKGTPLTNDEILDNFSSLLHASYDTTTSPMALIFKLLSSNPECYQKVVQEQLEILSNKEEGEEITWKDLKAMKYTWQVAQETLRMFPPVFGTFRKAITDIQYDGYTIPKGWKLLWTTYSTHPKDLYFNEPEKFMPSRFDQEGKHVAPYTFLPFGGGQRSCVGWEFSKMEILLFVHHFVKTFSSYTPVDPDEKISGDPLPPLPSKGFSIKLFPRP

SEQ ID NO: 21 - DNA, 1509 bp, Taxus chinensis
atggacgccctgtataagagcacagttgcaaaatttaatgaggtcacacagctggactgttccactgaatctttttccattgccctctcatctattgctggtattcttctgcttctcctgctcttccgttctaaacgccactcctcccttaaacttcctcctgggaaattaggcatccctttcattggcgagtcgtttatcttcctgagagctcttcgatcgaactcgctggagcaattttttgacgagagagtgaagaaattcggcctcgtgttcaagacctccttgattgggcatcccacagtagtactctgcggccctgcgggaaaccggcttattctgtccaacgaggagaagctggtgcagatgtcgtggcccgctcagtttatgaagctcatgggggagaattccgttgccaccaggaggggtgaagaccatatagttatgcgctctgctcttgcaggttttttcggccctggtgcgctgcagagttacattggtaaaatgaatacagagatccagaatcatatcaacgaaaaatggaagggaaaagatgaggtgaatgtacttcctttggtaagagagctcgtcttcaacatttcggccatcttgtttttcaacatatatgataagcaggaacaggatcgtctgcataagcttttggaaactattctggtcggaagttttgctcttccaattgacttgcccggatttggtttccatagagcactccagggacgggccacgctcaacaaaattatgctgtctttaattaaaaagagaaaagaagatctgcagtctggatcggcaacagccactcaggatctgctctctgttttgctcactttcagagatgacaaagggactccactcaccaatgacgagatactcgacaacttttcttctctgctccatgcctcctatgacaccaccacttcgccaatggctttgattttcaagctcttgtcttccaatccagaatgctatcaaaaagtagttcaagagcaattggagatactttccaacaaagaggagggcgaagaaatcacatggaaggatctgaaagccatgaaatacacatggcaagtagctcaggaaacactgcggatgtttcctccagttttcggaacatttcgcaaggccatcactgacattcagtatgatggttacacaattccaaaagggtggaagctgttgtggacaacttacagtacacatcccaaggacttgtatttcagtgaaccagagaaattcatgccgtcaagattcgatcaggaaggaaagcatgtagctccttacacatttttacccttcggtggaggccagcggtcatgtgtgggatgggagttttcaaagatggagattttactgttcgttcatcattttgtcaaaacttttagcagctacaccccagttgatcccgacgaaaaaatatcaggggatccactccctcctcttccttccaaaggattttccattaaactgtttcccgagaccatagtcaattga

SEQ ID NO: 22 - protein, 502 aa, Taxus chinensis
MDALYKSTVAKFNEVTQLDCSTESFSIALSSIAGILLLLLLFRSKRHSSLKLPPGKLGIPFIGESFIFLRALRSNSLEQFFDERVKKFGLVFKTSLIGHPTVVLCGPAGNRLILSNEEKLVQMSWPAQFMKLMGENSVATRRGEDHIVMRSALAGFFGPGALQSYIGKMNTEIQNHINEKWKGKDEVNVLPLVRELVFNISAILFFNIYDKQEQDRLHKLLETILVGSFALPIDLPGFGFHRALQGRATLNKIMLSLIKKRKEDLQSGSATATQDLLSVLLTFRDDKGTPLTNDEILDNFSSLLHASYDTTTSPMALIFKLLSSNPECYQKVVQEQLEILSNKEEGEEITWKDLKAMKYTWQVAQETLRMFPPVFGTFRKAITDIQYDGYTIPKGWKLLWTTYSTHPKDLYFSEPEKFMPSRFDQEGKHVAPYTFLPFGGGQRSCVGWEFSKMEILLFVHHFVKTFSSYTPVDPDEKISGDPLPPLPSKGFSIKLFPETIVN

SEQ ID NO: 23 - DNA, 1687 bp, Taxus cuspidata; identical to SEQ ID NO: 19

SEQ ID NO: 24 - protein, 499 aa, Taxus cuspidata; identical to SEQ ID NO: 20

SEQ ID NO: 25 - DNA, 1509 bp, Taxus wallichiana var. chinensis; identical to SEQ ID NO: 21

SEQ ID NO: 26 - protein, 502 aa, Taxus wallichiana var. chinensis; identical to SEQ ID NO: 22

SEQ ID NO: 27 - DNA, 1458 bp, Taxus cuspidata
atggatgcccttaagcaattggaagtttccccttccattcttttcgttaccctcgcagtaatggcaggcattatcctcttcttccgctctaaacgccattcctctgtaaaactcccccctggaaatctaggcttccctctggttggggagacactgcagttcgtgaggtcacttggctcgagcactccacagcagtttattgaagagagaatgagcaaatttggggatgtgttcaagacttccataatcgggcatcccacagtagtgctgtgtggacctgccggaaaccggttggttctgtcgaacgagaacaagctggtgcagatgtcatggccgagctccatgatgaaactcatcggcgaagattgtctcggcggcaaaacgggagagcagcatcggatcgtacgcgctgcactaactcggtttttgggtcctcaagcattgcagaatcatttcgctaaaatgagctcgggaatccaacgccacatcaatgaaaaatggaagggaaaggatgaggccactgtacttcctttggtaaaagacctcgtcttctccgtcgcaagccgcttgttttttggtataactgaggagcacctgcaggagcaacttcataacttgttggaagttattcttgtgggatctttttctgttccactcaacattcccggattcagttaccataaagcgattcaggcaagggccaccctcgctgacatcatgacccatttgatagaaaagaggagaaatgagctgcgtgcaggcactgcatctgagaatcaagatttgctctctgttttgctcactttcactgacgaaagggggaattcactggcggacaaggagatcctcgacaacttttctatgttacttcatggatcatatgactccaccaattccccacttaccatgttgattaaagtcttggcctcccatccagaaagctatgaaaaagtggctcaagagcaatttggaatactctccaccaaaatggagggagaagaaattgcttggaaagacctgaaggagatgaaatattcatggcaagttgttcaggaaacattgcgcatgtatcctcccatttttggaacatttcgcaaagccatcactgacattcattacaatggttatacaattccaaaaggatggaaacttttatggacaacttacagtactcaaaccaaggaagagtatttcaaggacgccgatcaattcaagccatcaagatttgaggaggaagggaagcatgtaaccccttacacatacttacctttcggaggaggcatgcgtgtttgtccagggtgggaattcgccaagatggagacattactgtttctccatcattttgttaaagccttctctgggttgaaggcaattgatccaaatgaaaaactttcagggaaaccacttcctcctctccctgtcaatgggcttcccattaaactctattccagatcttaa

SEQ ID NO: 28 - protein, 485 aa, Taxus cuspidata
MDALKQLEVSPSILFVTLAVMAGIILFFRSKRHSSVKLPPGNLGFPLVGETLQFVRSLGSSTPQQFIEERMSKFGDVFKTSIIGHPTVVLCGPAGNRLVLSNENKLVQMSWPSSMMKLIGEDCLGGKTGEQHRIVRAALTRFLGPQALQNHFAKMSSGIQRHINEKWKGKDEATVLPLVKDLVFSVASRLFFGITEEHLQEQLHNLLEVILVGSFSVPLNIPGFSYHKAIQARATLADIMTHLIEKRRNELRAGTASENQDLLSVLLTFTDERGNSLADKEILDNFSMLLHGSYDSTNSPLTMLIKVLASHPESYEKVAQEQFGILSTKMEGEEIAWKDLKEMKYSWQVVQETLRMYPPIFGTFRKAITDIHYNGYTIPKGWKLLWTTYSTQTKEEYFKDADQFKPSRFEEEGKHVTPYTYLPFGGGMRVCPGWEFAKMETLLFLHHFVKAFSGLKAIDPNEKLSGKPLPPLPVNGLPIKLYSRS

SEQ ID NO: 29 - DNA, 1790 bp, Taxus x media
accaaaaactctcgtctcagctctgcaaactcagtctctctcccgttgctctgttttctgctcagcaactcctttctgaaacgaaaatggatgcccttaagcaattggaagtttccccttccattcttttcgttaccctcgcagtaatggcaggcattatcctcttcttccgctctaaacgccattcctctgttaaactcccccctggaaatctaggcttccctctggttggggagacactgcagttcgtgaggtcacttggctcgagcactccacagcagtttattgaagagagaatgagcaaatttggggatgtgttcaagacttccataatcgggcatcccacagtagcgctgtgtggacctgccggaaaccggttggttctgtcgaacgagaacaagctggtgcagatgtcatggccgagctccatgatgaaactcattggcgaagattgtctcggcggcaaaacgggagagcagcatcggatcgtacgcgctgcactaactcggtttttgggtcctcaagcattgcagaatcatttcgctaaaatgagctcgggaatccaacgccacatcaatgaaaaatggaagggaaaggatgaggccactgtacttcctttggtaaaagacctcgtcttctccgtcgcaagccgcttgttttttggtataactgaggagcacctgcaggagcaacttcataacttgttggaagttattcttgtgggatctttttctgttccactcaacattcccggattcagttaccataaagcgattcaggcaagggctaccctcgctgacatcatgacctctttgatagaaaagaggagaaatgagctgcgtgcaggcactgcatctgagaatcaagatttgctctctgttttgctcactttcactgacgaaagggggaattcactggcggacaaggagatcctcgacaacttttctatgttacttcatggatcatatgactccaccaattccccacttaccatgttgattaaagtcttggcctcccatccagaaagctatgaaaaagtggctcaagagcaatttggaatactctccactaaaatggagggagaagaaattgcttggaaagacctgaaagagatgaaatattcatggcaagttgttcaggaaacattgcgcatgtatcctcccatttttggaacatttcgcaaagccatcactgacattcattacaatggttatacaattccaaaaggatggaaacttttatggacaacttacagtactcaaaccaaggaagagtatttcaaggacgccgatcaattcaagccatcaagatttgaggaggaagggaagcatgtaaccccttacacatacttacctttcggaggaggcatgcgtgtttgtccagggtgggaattcgccaagatggagacattactgtttctccatcattttgttaaagccttctctgggttgaaggcaattgatccaaatgaaaaactttcagggaaaccacttcctcctctccctgtcaatgggcttcccattaaactctattccagatcttaatcttaagccagttccataaaaaagacctatattattatatgaatagaaagtgtaatacctgtaactggctttaccatcggagtaccgtgacttgtattcacgaggtatgtgaaattcaaaacaggaacacaagatgattgctcatgctaaacttatctgtaactgggttttctatatgtaatttctattataaataagattactggtttgggttcttaaaataaaaaaaaaaaaaaaaaaaaaaaa

SEQ ID NO: 30 - protein, 485 aa, Taxus x media
MDALKQLEVSPSILFVTLAVMAGIILFFRSKRHSSVKLPPGNLGFPLVGETLQFVRSLGSSTPQQFIEERMSKFGDVFKTSIIGHPTVALCGPAGNRLVLSNENKLVQMSWPSSMMKLIGEDCLGGKTGEQHRIVRAALTRFLGPQALQNHFAKMSSGIQRHINEKWKGKDEATVLPLVKDLVFSVASRLFFGITEEHLQEQLHNLLEVILVGSFSVPLNIPGFSYHKAIQARATLADIMTSLIEKRRNELRAGTASENQDLLSVLLTFTDERGNSLADKEILDNFSMLLHGSYDSTNSPLTMLIKVLASHPESYEKVAQEQFGILSTKMEGEEIAWKDLKEMKYSWQVVQETLRMYPPIFGTFRKAITDIHYNGYTIPKGWKLLWTTYSTQTKEEYFKDADQFKPSRFEEEGKHVTPYTYLPFGGGMRVCPGWEFAKMETLLFLHHFVKAFSGLKAIDPNEKLSGKPLPPLPVNGLPIKLYSRS

SEQ ID NO: 31 - DNA, 1853 bp, Taxus wallichiana var. chinensis
atggatgcccttaagcaattggaagtttccccttccattcttttcgttaccctcgcagtaatggtaggcattatcctcttcttccgctctaaacgccattcctctgttaaactcccccctggaaatctaggcttccctctggttggggagacactgcagttcgtgaggacactcggctcgagcactccacagcagtttattgaagagagaatgagcaaatttggggatgtgttcaagacttccataatcgggcatcccacagtagtgctctgtggacctgccggaaaccggttggttctgtcgaacgagaacaagctggtgcagatgtcatggccgagctccatgatgaaactcatcggcgaagattgtctcggcggcaaaacgggagagcagcatcggatcgtacgcgctgcactaactcggtttttgggtcctcaagcattgcagaatcatttcgctaaaatgagctcgggaatccaacgccacatcaatgaaaaatggaggggaaaggatgaggtcactgtacttcctttggtaaaagacctcgtcttctccgtcgcaagccgcttgttttttggtataactgaggagcacctgcaggaacaacttcataacttgttggaagttattcttgtgggatctttttctgttccactcaacattcccggattcagttaccataaagcgatgcaggcaagggccaccctcgttgacatcatgacctctttgatagaaaagaggagaaatgagctgcgtgcaggcactgcatctgagaatcaagatttactctctgttttgctcactttcactgacgaaagggggaattcactggcggacaaggagatcctcgacaacttttctatgttacttcatggatcatatgactccaccaattccccacttaccatgttgattaaagtcttggcctcccatccagaaagctatgaaaaagtggctcaaggtatggaaacgtttctgtaatcttaatcctcctctctctctctctctctaatttttttttttttgtctgtactaagtagtaggtaccctgtctgattcaggaagagtttgtacagtttgtatgttattttggtcaaaccttacatatttagaacttgtcttgcgattactttttatagagtcacttagatatatattccttaatacactaactgtttatgtaagagttgttttgatccaagcgtatgatgtacaacagagcaattcggaatactctccactaaaatggagggagacgaaattgcttggaaggacctgaaagagatgaaatattcatggcaagttgctcaggaaacattgcgcatgtttcctcccatttttggaacatttcgcaaagccatcactgacattcattacaatggttatacaattccaaaaggatggaaagtaagttgtacacgggtctaccggattttgattaaaaatagttttcctattaattatagtgtactaaagcaaccttgattaaacattctaagaaaactaaaccccataacaatggtggtttttttttatgtggacagcttttatggacaacttacagtactcataccaaggaagggtatttcaaaggcgccgatcaattcaagccatcaagatttgaggaggaagggaagcatgtaaccccttacacatacttacctttcggaggaggcatgcgtggttgtccagggtgggaattcgccaagatggagacattactgtttctccatcactttgttaaagccctctctgggttgaaggcaattgatccaaatgaaaaactttcagggaaaccacttcctcctctccctgtcaatgggcttcccattaaactctattccagatcttaa

SEQ ID NO: 32 - protein, 485 aa, Taxus wallichiana var. chinensis
MDALKQLEVSPSILFVTLAVMVGIILFFRSKRHSSVKLPPGNLGFPLVGETLQFVRTLGSSTPQQFIEERMSKFGDVFKTSIIGHPTVVLCGPAGNRLVLSNENKLVQMSWPSSMMKLIGEDCLGGKTGEQHRIVRAALTRFLGPQALQNHFAKMSSGIQRHINEKWRGKDEVTVLPLVKDLVFSVASRLFFGITEEHLQEQLHNLLEVILVGSFSVPLNIPGFSYHKAMQARATLVDIMTSLIEKRRNELRAGTASENQDLLSVLLTFTDERGNSLADKEILDNFSMLLHGSYDSTNSPLTMLIKVLASHPESYEKVAQEQFGILSTKMEGDEIAWKDLKEMKYSWQVAQETLRMFPPIFGTFRKAITDIHYNGYTIPKGWKLLWTTYSTHTKEGYFKGADQFKPSRFEEEGKHVTPYTYLPFGGGMRGCPGWEFAKMETLLFLHHFVKALSGLKAIDPNEKLSGKPLPPLPVNGLPIKLYSRS

SEQ ID NO: 33 - DNA, 1494 bp, Taxus cuspidata
atggatagcttcatttttctgagaagcataggaacaaaatttgggcagctggagtcttcccctgctattctttcccttaccctcgcacctattctcgccattattcttctcttgctcttccgttacaatcaccgatcctctgttaaacttccccctggaaagttaggttttcctctcatcggggagaccatacaattattgcggacactccgatcagaaacacctcaaaagttttttgatgatagattgaagaaattcggtcctgtttacatgacttccctaattgggcatcccacagttgtactctgcgggcctgcgggaaacaaattagttctttcgaacgaggacaagctggtagagatggaagggcccaagtctttcatgaaactgattggggaagattccattgttgctaaaagaggcgaggatcatcgcatcttacgcactgcacttgctcggtttttgggcgctcaagctttacaaaattatctgggtagaatgagttcagaaataggacaccatttcaatgaaaaatggaagggtaaagatgaagtgaaggtgcttcctttggtaagagggcttatcttctccattgcaagcaccctgtttttcgatgtaaatgatggacaccaacagaagcaacttcatcatcttctggaaactattcttgtgggaagtttgtcagtcccgctggactttccaggaactcgttatcgtaaagggcttcaggcgcggctgaagcttgatgaaattctctcctctctaataaaacgcagaagaagagatctgcgttcaggcatagcttctgatgatcaagatctactgtcggtgttgctcaccttcagagatgaaaaagggaactcactgacagaccaggggattctggacaacttttctgctatgtttcatgcttcatatgacaccactgttgcaccaatggccttgatatttaagcttctatactccaatcctgaataccatgaaaaagtatttcaagagcagttggaaataattggcaataaaaaggaaggggaagaaatcagttggaaggatttgaaatctatgaaatatacatggcaagcagttcaagaatcactacgaatgtacccaccagtttttggaatatttcgtaaggctatcactgatattcattatgatgggtatacaattccaaaaggatggagggttttatgttcaccttatactacacatctgagagaagagtacttccctgagcctgaagaattcaggccttcaagatttgaggatgaaggcaggcatgtgactccttacacatatgtaccatttggaggaggcctgcgcacatgtccaggatgggaattttcaaagattgaaatattactgtttgtccatcatttcgttaaaaatttcagcagctacattccagttgatcccaatgaaaaagttttatcagatccactacctcctctccctgccaatggattttccataaaactttttccgagatcctaa

SEQ ID NO: 34 - protein, 497 aa, Taxus cuspidata
MDSFIFLRSIGTKFGQLESSPAILSLTLAPILAIILLLLFRYNHRSSVKLPPGKLGFPLIGETIQLLRTLRSETPQKFFDDRLKKFGPVYMTSLIGHPTVVLCGPAGNKLVLSNEDKLVEMEGPKSFMKLIGEDSIVAKRGEDHRILRTALARFLGAQALQNYLGRMSSEIGHHFNEKWKGKDEVKVLPLVRGLIFSIASTLFFDVNDGHQQKQLHHLLETILVGSLSVPLDFPGTRYRKGLQARLKLDEILSSLIKRRRRDLRSGIASDDQDLLSVLLTFRDEKGNSLTDQGILDNFSAMFHASYDTTVAPMALIFKLLYSNPEYHEKVFQEQLEIIGNKKEGEEISWKDLKSMKYTWQAVQESLRMYPPVFGIFRKAITDIHYDGYTIPKGWRVLCSPYTTHLREEYFPEPEEFRPSRFEDEGRHVTPYTYVPFGGGLRTCPGWEFSKIEILLFVHHFVKNFSSYIPVDPNEKVLSDPLPPLPANGFSIKLFPRS

SEQ ID NO: 35 - DNA, 1494 bp, Taxus wallichiana var. chinensis
atggatagcttcatttttctgagaagcataggaacaaaatttgggcagctggagtcttcccctgctattatttcccttaccctcgcacctattctcgccattattcttctcttgctcttccgttacaatcaccgatcctctgttaaacttccccctggaaagttaggttttcctctcatcggggagaccatacaattattgcggacactccgatcagaaacacctcaaaagttttttgatgacagattgaagaaattcggtcctgtttacatgacttccctaattgggcattccacagttgtactctgcgggcctgcgggaaacaaattagctctttcgaacgaggacaagctggtagagatggaagggcccaagtctttcatgaaactgattggggaagattccattgttgctaaaagaggcgaggatcatcgcatcttacgcactgcacttgctcggtttttgggtgctcaagctttacaaaattatctgggtagaatgagttcagaaataggacaccatttcaataaaaaatggaagggtaaagatgaagtgaaggtgcttcctttggtaagagggcttatcttctccattgcaagcaccctgtttttcgatgcaaatgatggacaccaacagaagcaacttcatcatcttctggaaactattcttgtgggaagtttgtcagtcccgctggactttccaggaactcgttatcgtaaagggcttcaggcgcggctgaagcttgatgaaattctctcctctctaataaaacgcagaagaagtgatctgcgttcaggcatagcttctgatgatcaagatctactgtcggtgttgctcaccttcagagatgaaaaagggaactcactgacagaccaggggattctggacaacttttctgctatgtttcatgcttcatatgacaccactgttgcaccaatggccttgatatttaagcttctatactccaatcctgaataccatgaaaaagtatttcaagagcagttggaaataattggcaataaaaaggaaggggaagaaatcagttggaaggatttgaaatctatgaaatatacatggcaagcagttcaagaatcactacgaatgtaccctccagtttttggaatatttcgtaaggctatcactgatattcattatgatgggtatacaattccaaaaggatggagggttttatgttcaccttatactacacatctgagagaagagtacttccctgagcctgaaaaattcaggccttcaagatttgaggatgaaggcaggcatgtgactccttacacatatgtaccatttggaggaggcctgcgcacatgtccaggatgggaattttcaaagattgagatactactgtttgtccatcattttgttaaaaatttcagcagctacattccagttgatcccaatgaaaaagttttatcagatccactacctcctctccctgccaatggattttccataaaactttttccgagatcctaa

SEQ ID NO: 36 - protein, 497 aa, Taxus wallichiana var. chinensis
MDSFIFLRSIGTKFGQLESSPAIISLTLAPILAIILLLLFRYNHRSSVKLPPGKLGFPLIGETIQLLRTLRSETPQKFFDDRLKKFGPVYMTSLIGHSTVVLCGPAGNKLALSNEDKLVEMEGPKSFMKLIGEDSIVAKRGEDHRILRTALARFLGAQALQNYLGRMSSEIGHHFNKKWKGKDEVKVLPLVRGLIFSIASTLFFDANDGHQQKQLHHLLETILVGSLSVPLDFPGTRYRKGLQARLKLDEILSSLIKRRRSDLRSGIASDDQDLLSVLLTFRDEKGNSLTDQGILDNFSAMFHASYDTTVAPMALIFKLLYSNPEYHEKVFQEQLEIIGNKKEGEEISWKDLKSMKYTWQAVQESLRMYPPVFGIFRKAITDIHYDGYTIPKGWRVLCSPYTTHLREEYFPEPEKFRPSRFEDEGRHVTPYTYVPFGGGLRTCPGWEFSKIEILLFVHHFVKNFSSYIPVDPNEKVLSDPLPPLPANGFSIKLFPRS

SEQ ID NO: 37 - DNA, 1845 bp, Taxus x media
tcttgcagcatatatatatgtatatagtctctaccattcatcttgcagcacatgtactcccattcctctttcctattcactccctcctctctcagacccacctgctccaaatggatagcttcatttttctgagaagcataggaacaaaatttgggcagctggagtcttcccctgctattctttcccttaccctcgcacctattctcgccattattcttctcttgctcttccgttacaatcaccgatcctctgttaaacttccccctggaaagttaggttttcctctcatcggggagaccatacaattattgcggacactccgatcagaaacacctcaaaagttttttgatgatagattgaagaaattcggtcctgtttacatgacttccctaattgggcatcccacagttgtactctgcgggcctgcgggaaacaaattagttctttcgaacgaggacaagctggtagagatggaagggcccaagtctttcatgaaactgattggggaagattccattgttgctaaaagaggcgaggatcatcgcatcttacgcactgcacttgctcggtttttgggcgctcaagctttacaaaattatctgggtagaatgagttcagaaataggacaccatttcaatgaaaaatggaagggtaaagatgaagtgaaggtgcttcctttggtaagagggcttatcttctccattgcaagcaccctgtttttcgatgtaaatgatggacaccaacagaagcaacttcatcatcttctggaaactattcttgtagggagtttgtcagtcccgctggactttccaggaactcgttatcgtaaagggcttcaggcgcggctgaagcttgatgaaattctctcctctctaataaaacgcagaagaagagatctgcgttcaggcatagcttctgatgatcaagatctactgtcggtgttgctcaccttcagagatgaaaaagggaactcactgacagaccaggggattctggacaacttttctgctatgtttcatgcttcatatgacaccactgttgcaccaatggccttgatatttaagcttctatactccaatcctgaataccatgaaaaagtatttcaagagcagttggaaataattggcaataaaaaggaaggggaagaaatcagttggaaggatttgaaatctatgaagtatacatggcaagcagttcaagaatcactacgaatgtacccaccagtttttggaatatttcgtaaggctatcactgatattcattatgatgggtatacaattccaaaaggatggagggtttcatgttcaccttatactacacatctgagagaagagtacttccctgagcctgaagaattcaggccttcaagatttgaggatgaaggcaggcatgtgactccttacacatatgtaccatttggaggaggcctgcgcacatgtccaggatgggaattttcaaagattgaaatattactgtttgtccatcatttcgttaaaaacttcagcagctacattccagttgatcccaatgaaaaagttttatcagatccactacctcctctccctgccaatggattttccataaaactttttccgagatcctaatccatgacagagcattagatcaagatgttggaaatagatgggttaatacgataaagattgtgcctcagtagagtttggcttttattgctgtcttttatatgtatgtttgaaaagttttcctctatgagattatcaactagcaattacacatgagttgtaaattatgtcccagaagataacattattaagcttgttgaagttgtattttgtggaaaaaaaaaaaaaaaaaaaaaaaaaaaaa

SEQ ID NO: 38 - protein, 497 aa, Taxus x media
MDSFIFLRSIGTKFGQLESSPAILSLTLAPILAIILLLLFRYNHRSSVKLPPGKLGFPLIGETIQLLRTLRSETPQKFFDDRLKKFGPVYMTSLIGHPTVVLCGPAGNKLVLSNEDKLVEMEGPKSFMKLIGEDSIVAKRGEDHRILRTALARFLGAQALQNYLGRMSSEIGHHFNEKWKGKDEVKVLPLVRGLIFSIASTLFFDVNDGHQQKQLHHLLETILVGSLSVPLDFPGTRYRKGLQARLKLDEILSSLIKRRRRDLRSGIASDDQDLLSVLLTFRDEKGNSLTDQGILDNFSAMFHASYDTTVAPMALIFKLLYSNPEYHEKVFQEQLEIIGNKKEGEEISWKDLKSMKYTWQAVQESLRMYPPVFGIFRKAITDIHYDGYTIPKGWRVSCSPYTTHLREEYFPEPEEFRPSRFEDEGRHVTPYTYVPFGGGLRTCPGWEFSKIEILLFVHHFVKNFSSYIPVDPNEKVLSDPLPPLPANGFSIKLFPRS

SEQ ID NO: 39 - DNA, 1703 bp, Taxus chinensis
atggatagcttcatttttctgagaagcataggaacaaaatttgggcagctggagtcttcccctgctattatttcccttaccctcgcacctattctcgccattattcttctcttgctcttccgttacaatcaccgatcctctgttaaacttccccctggaaagttaggttttcctctcatcggggagaccatacaattattgcggacactccgatcagaaacacctcaaaagttttttgatgacagattgaagaaattcggtcctgtttacatgacttccctaattgggcattccacagttgtactctgcgggcctgcgggaaacaaattagctctttcgaacgaggacaagctggtagagatggaagggcccaagtctttcatgaaactgattggggaagattccattgttgctaaaagaggcgaggatcatcgcatcttacgcactgcacttgctcggtttttgggtgctcaagctttacaaaattatctgggtagaatgagttcagaaataggacaccatttcaataaaaaatggaagggtaaagatgaagtgaaggtgcttcctttggtaagagggcttatcttctccattgcaagcaccctgtttttcgatgcaaatgatggacaccaacagaagcaacttcatcatcttctggaaactattcttgtgggaagtttgtcagtcccgctggactttccaggaactcgttatcgtaaagggcttcaggcgcggctgaagcttgatgaaattctctcctctctaataaaacgcagaagaagtgatctgcgttcaggcatagcttctgatgatcaagatctactgtcggtgttgctcaccttcagagatgaaaaagggaactcactgacagaccaggggattctggacaacttttctgctatgtttcatgcttcatatgacaccactgttgcaccaatggccttgatatttaagcttctatactccaatcctgaataccatgaaaaagtatttcaaggtacgccaaatctctgttactttctttcttttctacatgtgggtattacaagtctatgtaatttatgtggacgtgtgtggtatatgtataacagagcagttggaaataattggcaataaaaaggaaggggaagaaatcagttggaaggatttgaaatctatgaaatatacatggcaagcagttcaagaatcactacgaatgtaccctccagtttttggaatatttcgtaaggctatcactgatattcattatgatgggtatacaattccaaaaggatggagggtaagctgtttcattacttcaattcatgttttgaaattcgatgtttaagctcttgtttttccggattccccaaactaatttcattaataattttcttacatatgttgtgaaacaggttttatgttcaccttatactacacatctgagagaagagtacttccctgagcctgaaaaattcaggccttcaagatttgaggatgaaggcaggcatgtgactccttacacatatgtaccatttggaggaggcctgcgcacatgtccaggatgggaattttcaaagattgagatactactgtttgtccatcattttgttaaaaatttcagcagctacattccagttgatcccaatgaaaaagttttatcagatccactacctcctctccctgccaatggattttccataaaactttttccgagatcctaa

SEQ ID NO: 40 - protein, 497 aa, Taxus chinensis; identical to SEQ ID NO: 36

SEQ ID NO: 41 - DNA, 1488 bp, Taxus canadensis
atggacgccatggatctcacagttgcaaagtttaaggaattcacgcagctacagtcctctgctattcttctcactgttgtttctggaatcatcgtcatcgtaatcctgctcctccgttctaaacgccgctcctctctcaaacttcctccggggaaattaggcctccctctcattggggaatcgttatcattcctgtgggctcttcgatcaaacacactcgaacagtttgtggacaaaagagtgaagaaatacggcaatgtcttcaagacatcgttacttgggcaacccacagtagtactgtgtggcgcagccggaaaccgcctaattctgtcgaaccaggagaagctgttgagccgaacggtgtcggatcgagtagcgaaactgacgggtgatacttctatttcggttatagcgggagacagtcatcgcatcatacgcgcagcagttgcagggtttttggggccagcaggactcaagattcacattggcgaaatgagcgcacatatccgaaatcatatcaaccaagtatggaagggaaaagatgaagtgaacgtacttagtttggcaagagagctggtcttcgccatctcggccagtttgtttttaaatataaatgatagagaggaacagcaccaattgcataagactctcgaaactattcttcccggatatttttctgttcctataaacttccccggatttgcctttcgcaaggcactggagggaaactcgaagcgtaggaaacatttctctgttttacaagaaaagagaagaagggatctgagcgtagggttagcatcccgcactcaggatctgctttctgttttgctcgcctacgaagatgacaaagggaatccactcaccgatgaggaggtcctcgacaacatttctgcgctcattgatggctcctacgagagcacctcttcacaaatggccatgcttttaaagctgttgtctgaccatccagaatgctatgaaaaagtagttcaagagcaattggagatagcttcacataaaaaggaaggagaagaaatcacatggaaggatgtgaaagccatgagatacacatggcaagtaatgcaggagacgctgcggatgtttgcccctgtttttggacctcgtgggaaagctataactgacattcattatgacggttacaccattccaaaaggatggcaactttcatgggcaacttattcgacccatcagaatgatacatatttcaatgagccggacaaattcatgccgtccagattcgacgaggaaggagggcgtttggctccttacacattcgtgccatttggaggagggagaaggaaatgcccaggatgggaattcgcaaagactgagatattactgttcgtccatcattttgttaaaacattcagtgcctacacgccaatcgaccctcacgaaagtatttgggggcgtccactccctcctgtccctgccaatggatttcctattaaacttatttctcgatcctaa

SEQ ID NO: 42 - protein, 495 aa, Taxus canadensis
MDAMDLTVAKFKEFTQLQSSAILLTVVSGIIVIVILLLRSKRRSSLKLPPGKLGLPLIGESLSFLWALRSNTLEQFVDKRVKKYGNVFKTSLLGQPTVVLCGAAGNRLILSNQEKLLSRTVSDRVAKLTGDTSISVIAGDSHRIIRAAVAGFLGPAGLKIHIGEMSAHIRNHINQVWKGKDEVNVLSLARELVFAISASLFLNINDREEQHQLHKTLETILPGYFSVPINFPGFAFRKALEGNSKRRKHFSVLQEKRRRDLSVGLASRTQDLLSVLLAYEDDKGNPLTDEEVLDNISALIDGSYESTSSQMAMLLKLLSDHPECYEKVVQEQLEIASHKKEGEEITWKDVKAMRYTWQVMQETLRMFAPVFGPRGKAITDIHYDGYTIPKGWQLSWATYSTHQNDTYFNEPDKFMPSRFDEEGGRLAPYTFVPFGGGRRKCPGWEFAKTEILLFVHHFVKTFSAYTPIDPHESIWGRPLPPVPANGFPIKLISRS

SEQ ID NO: 43 - DNA, 1659 bp, Taxus wallichiana var. chinensis
atggacgccatggatctcacagttgcaaagtttaaggaatttacgcagctacagtcctctgctattcttctcactgctgtttctggaatcatcgtcatcgtaatcctgctcctccgttctaaacgccgctcctctctcaaacttcctccggggaaattaggcctccctctcattggggaatcgttatcattccagtgggctcttcgatcaaacacactcgaacagtttgtggacaaaagagtgaagaaatacggcaatgtcttcaagacatcgttacttgggcaacctacagtagtactctgcggcgcagccggaaaccgcctaattctgtcgaaccaggagaagctgttgagccgaacggtgtcggatcgagtagcgaaactgacgggtgataattctatttcggttatagtgggagacagtcatcgcatcatacgcgcagcagttgcaggatttttggggccggcaggactccagattcacattggcgaaatgagcgcacatatccgaaatcatatcaaccaagtatggaagggaaaagatgaagtgaacgtacttagtttggcaagagagctggtcttcgccacctcggccagtttgtttttaaatataaatgatagagaggaacagcaccaattgcataagactcccgaaactattcttgccggatatttttctgttcctataaacttccccggatttgcctttcgtaaagcactggagggaaactcgaagcgtaggaaacatttctctgttttactagaaaagagaagaagggatctgagcttagggttagcatcccgcaatcaggatctgctctctgttttgctcaccttcaaagatgacaaagggaatccactcacggatgaggacgacctcgacaacatttctgcgctcattgatggctcctacgagagcacctcttcacaaatggccgtgcttttaaagctgttgtctgcccatccacaatgctatgaaaaagtagttcaaggtatgcaatgcttctgcacagttaaatttccctatgattgtattagcagctatgtaatctgtgtggatacattgataatattacagagcaattggagatagcttcacataaaaaggaaggagaagaaatcacatggaaggatgtgaaagccatgagatacacatggcaagtaatgcaggagacgctgcggatgttcgcccctgtttttggacctcgtgggaaagctataactgacattcattatgacggttacaccattccaaaaggatggcaagtaagttatacggtcctcgtgtcttctatctaactaaataaatctgcatgtactccttacgtttgtgatgtgtgagtttttgcagctttcatgggcaacttattcaacccatcagaatgatacatatttcaatgagccggacaaattcatgccgtccagattcgacgaggaaggagggcgtttggctccttacacattcgtgccatttggaggagggagacggacatgcctaggatgggaattcgcaaagactgagatattactgttcgtccatcattttgttaaaacattcagtgcctacaccccaatcgatcctcacgaaagtattcgggggcgtccactccctcctgtccctgccaatggatttcctattaaacttatttctcgatcctaa

SEQ ID NO: 44 - protein, 495 aa, Taxus wallichiana var. chinensis
MDAMDLTVAKFKEFTQLQSSAILLTAVSGIIVIVILLLRSKRRSSLKLPPGKLGLPLIGESLSFQWALRSNTLEQFVDKRVKKYGNVFKTSLLGQPTVVLCGAAGNRLILSNQEKLLSRTVSDRVAKLTGDNSISVIVGDSHRIIRAAVAGFLGPAGLQIHIGEMSAHIRNHINQVWKGKDEVNVLSLARELVFATSASLFLNINDREEQHQLHKTPETILAGYFSVPINFPGFAFRKALEGNSKRRKHFSVLLEKRRRDLSLGLASRNQDLLSVLLTFKDDKGNPLTDEDDLDNISALIDGSYESTSSQMAVLLKLLSAHPQCYEKVVQEQLEIASHKKEGEEITWKDVKAMRYTWQVMQETLRMFAPVFGPRGKAITDIHYDGYTIPKGWQLSWATYSTHQNDTYFNEPDKFMPSRFDEEGGRLAPYTFVPFGGGRRTCLGWEFAKTEILLFVHHFVKTFSAYTPIDPHESIRGRPLPPVPANGFPIKLISRS

SEQ ID NO: 45 - DNA, 1529 bp, Taxus cuspidata
ggcacgagcttacaagagttttcataatggatgccctttctcttgtaaacagcacagttgcaaaatttaatgaggtaacgcagctacaggcttcccctgctattctgtccactgccctcactgctattgcaggcattattgtgctcctcgtcatcacttctaaacgccgttcctctcttaaacttcctcctggaaaactaggcctccctttcattggcgagactttagagttcgtgaaggctcttcgatcagacacacttcgacaatttgtggaggaaagggaggggaaatttggacgtgtgttcaagacttcattgcttgggaagcccactgtaatactctgcggccctgcgggaaaccgcttagttctttccaacgaggaaaaactgttgcacgtgtcgtggtccgcccaaattgccagaatcctgggtctcaattctgttgcagtgaaaaggggagatgatcaccgcgttctgcgtgtcgcactagcaggttttttgggctctgcagggctacagctttacataggtaaaatgagtgcacttatcagaaatcatatcaatgaaaaatggaagggaaaagatgaagtgaatgtactgagtttggtaagagatcttgtcatggacaattcagctatcttgtttttcaatatatacgataaagagcgaaagcaacaactgcatgaaatattgaaaatcattcttgcctcacatttcggcatacctttaaacattcccggatttctgtatcgcaaagcactcaaggggagcttgaagcggaaaaaaattctctccgctttactggaaaagagaaaagacgaactgcgctcaagattagcgtctagcaatcaagatcttctctctgttttgctcagcttcagagatgaaagagggaaaccactgagcgacgaggcagtcttagacaactgttttgcaatgctggatgcctcctatgacaccaccacttcacaaatgactctgattttaaagatgttgtcttccaatccagaatgctttgaaaaagtagttcaagagcaattggagatagcgtcaaataaaaaggagggagaagaaatcacaatgaaggatatcaaagccatgaaatacacatggcaagtgctccaggaaagtctacggatgctttctccagtatttggaacacttcgtaagaccatgaatgacattaatcacgatggttacacaattccaaaaggatggcaggttgtatggacaacttattctacacatcagaaagacatatatttcaagcagccagataaattcatgccttcgagattcgaagaggaagatgggcatttggatgcttatacattcgtaccatttggaggaggacggcggacatgtccaggatgggaatacgcaaaagtggaaatattactgttcctccatcattttgtgaaagcattcagtggttacaccccaactgaccctcatgaaaggatttgtgggtatccagtccctcttgtccctgtcaagggatttccaataaaacttatcgccagatcctga

SEQ ID NO: 46 - protein, 500 aa, Taxus cuspidata
MDALSLVNSTVAKFNEVTQLQASPAILSTALTAIAGIIVLLVITSKRRSSLKLPPGKLGLPFIGETLEFVKALRSDTLRQFVEEREGKFGRVFKTSLLGKPTVILCGPAGNRLVLSNEEKLLHVSWSAQIARILGLNSVAVKRGDDHRVLRVALAGFLGSAGLQLYIGKMSALIRNHINEKWKGKDEVNVLSLVRDLVMDNSAILFFNIYDKERKQQLHEILKIILASHFGIPLNIPGFLYRKALKGSLKRKKILSALLEKRKDELRSRLASSNQDLLSVLLSFRDERGKPLSDEAVLDNCFAMLDASYDTTTSQMTLILKMLSSNPECFEKVVQEQLEIASNKKEGEEITMKDIKAMKYTWQVLQESLRMLSPVFGTLRKTMNDINHDGYTIPKGWQVVWTTYSTHQKDIYFKQPDKFMPSRFEEEDGHLDAYTFVPFGGGRRTCPGWEYAKVEILLFLHHFVKAFSGYTPTDPHERICGYPVPLVPVKGFPIKLIARS

SEQ ID NO: 47 - DNA, 1482 bp, Taxus wallichiana var. chinensis
atggatgccctttctcttgtaaacagcacagttgcaaaatttaatgaggtaacgcagctacaggcttcccctgctattctgtccattgccctcactgctattgcaggcattattgtgctcctcgtcatcacatctaaacgccgttcctctcttaaacttcctcctggaaaactaggcctccctttcattggcgagactttagagttcgtgaaggctcttcgatcagacacacttcgacaatttgtggaggaaagggaggggaaatttggacgtgtgttcaagacttcattgcttgggaagcccactgtaatactctgcggccctgcgggaaaccgcttagttctttccaacgaggaaaaactgttgcacgtgtcgtggtccgcccaaattgccagaattctgggtctcaattctgttgcagtgaaaaggggagatgatcaccgcgttctgcgtgtcgcactagcaggttttttgggctctgcagggctacagctttacataggtaaaatgagtgcacttatcagaaatcatatcaatgaaaaatggaagggaaaagatgaagtgaatgtactgagtttggttagagatcttgtcatggacaattcagctatcttgtttttcaatatatacgataaagagcgaaagcaacaactgcatgaaatattgaaaatcattcttgcctcacatttcggcatacctttaaacattcccggatttctgtatcgcaaagcactcaaggggagtttgaagcggaaaaaaattctctccgctttactggaaaagagaaaagacgaactgcgctcaggattagcgtctagcaatcaagatcttctctctgttttgctcagcttcagaggcgacgaggcagtcttagacaactgttttgcaatgctggatgcctcctatgacaccaccacttcacaaatgactctgattttaaagatgttgtcttccaatccagaatgctttgaaaaagtagttcaagagcaattggagatagcttcaaataaaaaggagggagaagaaatcacaatgaaggatatcaaagccatgaaatacacatggcaagtgctccaggaaagtctacggatgctttctccagtatttggaacacttcgtaagatcatgaatgacattaatcacgatggttacacaattccaaaaggatggcaggttgtatggacaacttattctacacatcagaaagacatatatttcaagcagccagataacttcatgccttcgagattcgaggaggaagatgggcatttggatgcttatacattcgtaccatttggaggaggacggcgggcatgtccaggatgggaatacgcaaaagtgggaatattactgttcctccatcattttgtgaaagcattcagtggttacaccccaactgaccctcatgaaaggatttgtgggtatccagtccctcttgtccctatcaagggatttccaataaaacttatcgccagatcctga

SEQ ID NO: 48 - protein, 493 aa, Taxus wallichiana var. chinensis
MDALSLVNSTVAKFNEVTQLQASPAILSIALTAIAGIIVLLVITSKRRSSLKLPPGKLGLPFIGETLEFVKALRSDTLRQFVEEREGKFGRVFKTSLLGKPTVILCGPAGNRLVLSNEEKLLHVSWSAQIARILGLNSVAVKRGDDHRVLRVALAGFLGSAGLQLYIGKMSALIRNHINEKWKGKDEVNVLSLVRDLVMDNSAILFFNIYDKERKQQLHEILKIILASHFGIPLNIPGFLYRKALKGSLKRKKILSALLEKRKDELRSGLASSNQDLLSVLLSFRGDEAVLDNCFAMLDASYDTTTSQMTLILKMLSSNPECFEKVVQEQLEIASNKKEGEEITMKDIKAMKYTWQVLQESLRMLSPVFGTLRKIMNDINHDGYTIPKGWQVVWTTYSTHQKDIYFKQPDNFMPSRFEEEDGHLDAYTFVPFGGGRRACPGWEYAKVGILLFLHHFVKAFSGYTPTDPHERICGYPVPLVPIKGFPIKLIARS

SEQ ID NO: 49 - DNA, 1388 bp, Taxus cuspidata
aggagagtccaaatatctacaatgggcaggttcaatgtagatatgattgagcgagtgatcgtggcgccatgccttcaatcgcccaaaaatatcctgcacctctcccccattgacaacaaaactagaggactaaccaacatattatcagtctacaatgcctcccagagagtttctgtttctgcagatcctgcaaaaacaattcgagaggctctctccaaggtgctggtttattatcccccttttgctggaaggctgagaaacacagaaaatggggatcttgaagtggagtgcacaggggagggtgccgtctttgtggaagccatggcggacaacgacctttcagtattacaagatttcaatgagtacgatccatcatttcagcagctagtttttaatcttcgagaggatgtcaatattgaggacctccatcttctaactgttcaggtaactcgttttacatgtggaggatttgttgtgggcacaagattccaccatagtgtatctgatggaaaaggaatcggccagttacttaaaggcatgggagagatggcaaggggggagtttaagccctcgttagaaccaatatggaatagagaaatggtgaagcctgaagacattatgtacctccagtttgatcactttgatttcatacacccacctcttaatcttgagaagtctattcaagcatctatggtaataagctttgagagaataaattatatcaaacgatgcatgatggaagaatgcaaagaatttttttctgcatttgaagttgtagtagcattgatttggctggcaaggacaaagtcttttcgaattccacccaatgagtatgtgaaaattatctttccaatcgacatgaggaattcatttgactcccctcttccaaagggatactatggtaatgctattggtaatgcatgtgcaatggataatgtcaaagacctcttaaatggatctcttttatatgctctaatgcttataaagaaatcaaagtttgctttaaatgagaatttcaaatcaagaatcttgacaaaaccatctacattagatgcgaatatgaagcatgaaaatgtagtcggatgtggcgattggaggaatttgggattttatgaagcagattttggatggggaaatgcagtgaatgtaagccccatgcagcaacaaagagagcatgaattagctatgcaaaattattttctttttctccgatcagctaagaacatgattgatggaatcaagatactaatgttcatgcctgcatcaatggtgaaaccattcaaaattgaaatggaagtcacaataaacaaatatgtggctaaaatatgtaactctaagttataaagtatgtatgactgcaaaatagtaaaatattgcatggtggatgc

SEQ ID NO: 50 - protein, 440 aa, Taxus cuspidata
MGRFNVDMIERVIVAPCLQSPKNILHLSPIDNKTRGLTNILSVYNASQRVSVSADPAKTIREALSKVLVYYPPFAGRLRNTENGDLEVECTGEGAVFVEAMADNDLSVLQDFNEYDPSFQQLVFNLREDVNIEDLHLLTVQVTRFTCGGFVVGTRFHHSVSDGKGIGQLLKGMGEMARGEFKPSLEPIWNREMVKPEDIMYLQFDHFDFIHPPLNLEKSIQASMVISFERINYIKRCMMEECKEFFSAFEVVVALIWLARTKSFRIPPNEYVKIIFPIDMRNSFDSPLPKGYYGNAIGNACAMDNVKDLLNGSLLYALMLIKKSKFALNENFKSRILTKPSTLDANMKHENVVGCGDWRNLGFYEADFGWGNAVNVSPMQQQREHELAMQNYFLFLRSAKNMIDGIKILMFMPASMVKPFKIEMEVTINKYVAKICNSKL

SEQ ID NO: 51 - DNA, 1478 bp, Taxus x media
ggcagtattgaaggagaagagagtccaaatatctacaatgggcaggttcaatgtggatatgattgagcgagtgatcgtggcgccatgccttccatcgcccaaaaaaatcctgcgcctctcccccattgacaacaaaaccagagcactaaccaacatattatcagtctacaatgcctcccagagagtttctgtttctgcagatcctgcagaaacaattcgagaggctctctccaaggtgctggtttattatcccccttttgctggaaggctgagaaacacagaaaatggggatcttgaagtggagtgcacaggggagggtgccgtctttgtggaagccatggcggacaacgacctttcagtattacaagatttcaatgagtacgatccatcatttcagcagctagttttttatcttccagaggatgtcaatattgaggacctccatcttctaactgttcaggtaactcgttttacatgtgggggatttgttgtgggcacaagattccaccatagtgtatctgatggaaaaggaatcggccagttacttaaaggcatgggagagatggcaaggggggagtttaagccctcgttagaaccaatatggaatagagaaatggtgaagcctgaagacattatgtacctccagtttgatcactttgatttcatacacccacctcttaatcttgagaagtctattcaagcatctatggtaataagctttgagagaataaattatatcaaacgatgcatgatggaagaatgcaaagaatttttttctgcatttgaagttgtagtagcattgatttggctagcaaggacaaagtcttttcgaattccacccaatgagtatgtgaaaattatctttccaatcgacatgaggaattcatttgactcccctcttccaaagggatactatggtaatgctattggtaatgcatgtgcaatggataatgtcaaagacctcttaaatggatctcttttatatgctctaatgcttataaagaaatcaaagtttgctttaaatgagaatttcaaatcaagaatcttgacaaaaccatctgcattagatgcgaatatgaagcatgaaaatgtagtcggatgtggcgattggaggaatttgggattttatgaagcagattttggatggggaaatgcagtgaatgtaagccccatgcagcaacaaagagagcatgaattagctatgcaaaattattttctttttcttcgatcaactaagaacatggttgatggaatcaagatactaatgttcatgcctgcatcaatggtgaaaccattcaaaattgaaatggaagtcataataaacaaatatgtggctaaaatatgtaactctaagttataaagtatgtatgactgcaaaatagtaaaatattgcatggtggatgcaccatagtcaagtaaataaaaaaattggtacttctgattattgtatgctcaaaaaaaaaaaaaaaaaaaaaaaa

SEQ ID NO: 52 - protein, 440 aa, Taxus x media
MGRFNVDMIERVIVAPCLPSPKKILRLSPIDNKTRALTNILSVYNASQRVSVSADPAETIREALSKVLVYYPPFAGRLRNTENGDLEVECTGEGAVFVEAMADNDLSVLQDFNEYDPSFQQLVFYLPEDVNIEDLHLLTVQVTRFTCGGFVVGTRFHHSVSDGKGIGQLLKGMGEMARGEFKPSLEPIWNREMVKPEDIMYLQFDHFDFIHPPLNLEKSIQASMVISFERINYIKRCMMEECKEFFSAFEVVVALIWLARTKSFRIPPNEYVKIIFPIDMRNSFDSPLPKGYYGNAIGNACAMDNVKDLLNGSLLYALMLIKKSKFALNENFKSRILTKPSALDANMKHENVVGCGDWRNLGFYEADFGWGNAVNVSPMQQQREHELAMQNYFLFLRSTKNMVDGIKILMFMPASMVKPFKIEMEVIINKYVAKICNSKL

SEQ ID NO: 53 - DNA, 1481 bp, Taxus wallichiana var. wallichiana
ggcagtattgaaggagaagagagtccaaatatctacaatgggcaggttcaatgtagatatgattgagcgagtgatcgtggcgccatgccttccatcgcccaaaaaaatcctgcacctctcccccattgacaacaaaaccagagcactaaccaacacattatcagtctacaatgcctcccagagagtttctgtttctgcagatcctgcagaaacaattcgagaggctctctccaaggtgctggtttattatcccccttttgctggaaggctgagaagcacagaaaatgggaaacttgaagtggagtgcacaggggagggtgccgtctttgtggaagccatggcggacaacgacctttcagtattacaagatttcaatgagtacgatccatcatttcagcagttagtttttaatcttccagaggatgtcaatattgaggacctccatcttctaactgttcaggtaactcgttttacatgtgggggatttgttgtgggcacaagattccaccatagtgtatctgatggaaaaggaatcggcgagttacttaaaggcatgggagatatggcaaggggggagtttaagccctcgttagaaccaatatggagtagagaaatggtgaagcctgaagacattatgtacctccagtttgatcagtttgatttcatacgcccacctcttaatcttgagaagtctattcaagcatctatggtaataagctttgagaaaataaattatatcaaacgatgcatgatggaagaatgcaacgaatttttttctgcatttgaagttgtagtagcattgatttggctagcaaggacaaagtcttttcgaattccacccaatgagtatgtgaaaattatctttccaatggacatgaggaattcatttgacccccctcttccaaagggatactacggtaatgctattggtaatgcatgtgcaatggataatgtcaaatacctcttaaatggatctcttttatatgctctaatgcttataaagaaatcaaagtttgctttatatgaaaatttcaaatcaagaatcttgacaaaaccatctacattagatgcaaatatgaagcatgaaaatgtagtcggatgtggcgattggaggaatttgggattttatgaagcagattttggatggggaaatgcagtgaatgtaagccccatgcagcaacaaagagagcatgaattagctatgcaaaattattttctttttctccgatcagctaagaacatgattgatggaatcaagatactaatgttcatgccttcatcaatggtgaaaccattcaaaattgaaatggaagtcacaataaacaaatatgtggctaaaatatgtaactctaatttataaagtatgtatgactgcaaaatagtaaaatattgcatggtggatgcaccatagtcaagtaaataaaaaatttggtacttctgattattgtatgctcaaaaaaaaaaaaaaaaaaaaaaaaaaa

SEQ ID NO: 54 - protein, 440 aa, Taxus wallichiana var. wallichiana
MGRFNVDMIERVIVAPCLPSPKKILHLSPIDNKTRALTNTLSVYNASQRVSVSADPAETIREALSKVLVYYPPFAGRLRSTENGKLEVECTGEGAVFVEAMADNDLSVLQDFNEYDPSFQQLVFNLPEDVNIEDLHLLTVQVTRFTCGGFVVGTRFHHSVSDGKGIGELLKGMGDMARGEFKPSLEPIWSREMVKPEDIMYLQFDQFDFIRPPLNLEKSIQASMVISFEKINYIKRCMMEECNEFFSAFEVVVALIWLARTKSFRIPPNEYVKIIFPMDMRNSFDPPLPKGYYGNAIGNACAMDNVKYLLNGSLLYALMLIKKSKFALYENFKSRILTKPSTLDANMKHENVVGCGDWRNLGFYEADFGWGNAVNVSPMQQQREHELAMQNYFLFLRSAKNMIDGIKILMFMPSSMVKPFKIEMEVTINKYVAKICNSNL

SEQ ID NO: 55 - DNA, 1960 bp, Taxus cuspidata
ggcagtattgaaggagaggagagtccaaatatctacaatgggcaggttcaatgtagatatgattgagcgagtgatcgtggcgccatgccttcaatcgcccaaaaatatcctgcacctctcccccattgacaacaaaactagaggactaaccaacatattatcagtctacaatgcctcccagagagtttctgtttctgcagatcctgcaaaaacaattcgagaggctctctccaaggtgctggtttattatcccccttttgctggaaggctgagaaacacagaaaatggggatcttgaagtggagtgcacaggggagggtgccgtctttgtggaagccatggcggacaacgacctttcagtattacaagatttcaatgagtacgatccatcatttcagcagctagtttttaatcttcgagaggatgtcaatattgaggacctccatcttctaactgttcaggtaacgttttagactgcctttctcatttatttatgctattttttttggttagatgtcgtcgtctttttttttggttgagggcctgggtttaatccagtcctctttagcttagatgccaggtctgaagggtatccattcccccaaagttgtattgggcacgtcccggcctcatccctttcttatattaggagtggaactctggtggatggctaggcaacacctttaaaccatcatcaacactcttggaccacaacccattcgataattagatgtcttaaatgtatttatgggaattataataaataataatggtggtgtgtaaaatttttaagataatggtcttgagattgatatgtctcacatatttgtagtagattttgctcttggtcatctttattatttttctaatatgttgaacaatttaaaataatatctcttataacatggtgccatactgtttttatcaatttcaattttgtgttttctatattgggtctttcatggaggtaagtcgttttacatgtggaggatttgttgtgggcacaagattccaccatagtgtatctgatggaaaaggaatcggccagttacttaaaggcatgggagagatggcaaggggggagtttaagccctcgttagaaccaatatggaatagagaaatggtgaagcctgaagacattatgtacctccagtttgatcactttgatttcatacacccacctcttaatcttgagaagtctattcaagcatctatggtaataagctttgagagaataaattatatcaaacgatgcatgatggaagaatgcaaagaatttttttctgcatttgaagttgtagtagcattgatttggctggcaaggacaaagtcttttcgaattccacccaatgagtatgtgaaaattatctttccaatcgacatgaggaattcatttgactcccctcttccaaagggatactatggtaatgctattggtaatgcatgtgcaatggataatgtcaaagacctcttaaatggatctcttttatatgctctaatgcttataaagaaatcaaagtttgctttaaatgagaatttcaaatcaagaatcttgacaaaaccatctacattagatgcgaatatgaagcatgaaaatgtagtcggatgtggcgattggaggaatttgggattttatgaagcagattttggatggggaaatgcagtgaatgtaagccccatgcagcaacaaagagagcatgaattagctatgcaaaattattttctttttctccgatcagctaagaacatgattgatggaatcaagatactaatgttcatgcctgcatcaatggtgaaaccattcaaaattgaaatggaagtcacaataaacaaatatgtggctaaaatatgtaactctaagttataaagtatgtatgactgcaaaatagtaaaatattgcatggtggatgcaccatagtcaagtaaataaaaaaattggtacttctgattattgtatgctc

SEQ ID NO: 56 - protein, 440 aa, Taxus cuspidata; identical to SEQ ID NO: 50

SEQ ID NO: 57 - DNA, 1955 bp, Taxus x media
ggcagtattgaaggagaagagagtccaaatatctacaatgggcaggttcaatgtggatatgattgagcgagtgatcgtggcgccatgccttccatcgcccaaaaaaatcctgcgcctctcccccattgacaacaaaaccagagcactaaccaacatattatcagtctacaatgcctcccagagagtttctgtttctgcagatcctgcagaaacaattcgagaggctctctccaaggtgctggtttattatcccccttttgctggaaggctgagaaacacagaaaatggggatcttgaagtggagtgcacaggggagggtgccgtctttgtggaagccatggcggacaacgacctttcagtattacaagatttcaatgagtacgatccatcatttcagcagctagttttttatcttccagaggatgtcaatattgaggacctccatcttctaactgttcaggtaacgttttagactgcctttctcatttatttatgctaattttttttagttagatgtctgtttttttttttttgtttaaggcctggatttaatccagtcctctttagtttagatgtcaggtctgaagggtatccattcccccaaagttgtctcgggtacgtcccgacgtcatccctttcttataatgggagtggaactctggtggatggctaggcaacacttttaacaccatcatcaacagaccacaacccattcgataattagatgtcttaaatgtatttatgggaattataataaataataatggtggtgtgtaaaatttttaagataatggtcttgaaattgatatctctcacatatttgtagtagattttgttcttgttcatctttattatttttctaatatgttgaacaatttaaaataatatctcttataacatggtgccatactgtttctatcaatttcaaatttgtgttttctatattgtgtctttcatgtaggtaagtcgttttacatgtgggggatttgttgtgggcacaagattccaccatagtgtatctgatggaaaaggaatcggccagttacttaaaggcatgggagagatggcaaggggggagtttaagccctcgttagaaccaatatggaatagagaaatggtgaagcctgaagacattatgtacctccagtttgatcactttgatttcatacacccacctcttaatcttgagaagtctattcaagcatctatggtaataagctttgagagaataaattatatcaaacgatgcatgatggaagaatgcaaagaatttttttctgcatttgaagttgtagtagcattgatttggctagcaaggacaaagtcttttcgaattccacccaatgagtatgtgaaaattatctttccaatcgacatgaggaattcatttgactcccctcttccaaagggatactatggtaatgctattggtaatgcatgtgcaatggataatgtcaaagacctcttaaatggatctcttttatatgctctaatgcttataaagaaatcaaagtttgctttaaatgagaatttcaaatcaagaatcttgacaaaaccatctgcattagatgcgaatatgaagcatgaaaatgtagtcggatgtggcgattggaggaatttgggattttatgaagcagattttggatggggaaatgcagtgaatgtaagccccatgcagcaacaaagagagcatgaattagctatgcaaaattattttctttttcttcgatcaactaagaacatggttgatggaatcaagatactaatgttcatgcctgcatcaatggtgaaaccattcaaaattgaaatggaagtcataataaacaaatatgtggctaaaatatgtaactctaagttataaagtatgtatgactgcaaaatagtaaaatattgcatggtggatgcaccatagtcaagtaaataaaaaaattggtacttctgattattgtatgctc

SEQ ID NO: 58 - protein, 440 aa, Taxus x media; identical to SEQ ID NO: 52

SEQ ID NO: 59 - DNA, 1955 bp, Taxus wallichiana var. wallichiana
ggcagtattgaaggagaagagagtccaaatatctacaatgggcaggttcaatgtagatatgattgagcgagtgatcgtggcgccatgccttccatcgcccaaaaaaatcctgcacctctcccccattgacaacaaaaccagagcactaaccaacacattatcagtctacaatgcctcccagagagtttctgtttctgcagatcctgcagaaacaattcgagaggctctctccaaggtgctggtttattatcccccttttgctggaaggctgagaagcacagaaaatgggaaacttgaagtggagtgcacaggggagggtgccgtctttgtggaagccatggcggacaacgacctttcagtattacaagatttcaatgagtacgatccatcatttcagcagttagtttttaatcttccagaggatgtcaatattgaggacctccatcttctaactgttcaggtaacgttttagactgccttcctcatttatttatgctatttttttttaagttagatgtccctttttttttgttgttgaaggcctggatttaatccagtcctctttagctcagatgtcaggtctgaagggtatccattcccccaaagttgtttcgggcacgtcccgacgtcatccctttcttataatgggagtggaactctggtggatggctaggcaacacttataacaccatcatcaacagaccacaacccattcgataattagatgtcttaaatgtatttatgggaattataataaataataatggtggtgtgtaaattttttaagataatggtcttgagattgatatttctcacatatttgtactagattttgttcttgttcatatttattatttttctaatatgttgaacaatttataataatatctcttataacatggtgccatactgtttctatcaatttcaaaattttgttttctatattgtgtctttcatgtaggtaagtcgttttacatgtgggggatttgttgtgggcacaagattccaccatagtgtatctgatggaaaaggaatcggcgagttacttaaaggcatgggagatatggcaaggggggagtttaagccctcgttagaaccaatatggagtagagaaatggtgaagcctgaagacattatgtacctccagtttgatcagtttgatttcatacgcccacctcttaatcttgagaagtctattcaagcatctatggtaataagctttgagaaaataaattatatcaaacgatgcatgatggaagaatgcaacgaatttttttctgcatttgaagttgtagtagcattgatttggctagcaaggacaaagtcttttcgaattccacccaatgagtatgtgaaaattatctttccaatggacatgaggaattcatttgacccccctcttccaaagggatactacggtaatgctattggtaatgcatgtgcaatggataatgtcaaatacctcttaaatggatctcttttatatgctctaatgcttataaagaaatcaaagtttgctttatatgaaaatttcaaatcaagaatcttgacaaaaccatctacattagatgcaaatatgaagcatgaaaatgtagtcggatgtggcgattggaggaatttgggattttatgaagcagattttggatggggaaatgcagtgaatgtaagccccatgcagcaacaaagagagcatgaattagctatgcaaaattattttctttttctccgatcagctaagaacatgattgatggaatcaagatactaatgttcatgccttcatcaatggtgaaaccattcaaaattgaaatggaagtcacaataaacaaatatgtggctaaaatatgtaactctaatttataaagtatgtatgactgcaaaatagtaaaatattgcatggtggatgcaccatagtcaagtaaataaaaaatttggtacttctgattattgtatgctc

SEQ ID NO: 60 - protein, 440 aa, Taxus wallichiana var. wallichiana; identical to SEQ ID NO: 54

SEQ ID NO: 61 - DNA, 2861 bp, Abies grandis
agatggccatgccttcctcttcattgtcatcacagattcccactgctgctcatcatctaactgctaacgcacaatccattccgcatttctccacgacgctgaatgctggaagcagtgctagcaaacggagaagcttgtacctacgatggggtaaaggttcaaacaagatcattgcctgtgttggagaaggtggtgcaacctctgttccttatcagtctgctgaaaagaatgattcgctttcttcttctacattggtgaaacgagaatttcctccaggattttggaaggatgatcttatcgattctctaacgtcatctcacaaggttgcagcatcagacgagaagcgtatcgagacattaatatccgagattaagaatatgtttagatgtatgggctatggcgaaacgaatccctctgcatatgacactgcttgggtagcaaggattccagcagttgatggctctgacaaccctcactttcctgagacggttgaatggattcttcaaaatcagttgaaagatgggtcttggggtgaaggattctacttcttggcatatgacagaatactggctacacttgcatgtattattacccttaccctctggcgtactggggagacacaagtacagaaaggtattgaattcttcaggacacaagctggaaagatggaagatgaagctgatagtcataggccaagtggatttgaaatagtatttcctgcaatgctaaaggaagctaaaatcttaggcttggatctgccttacgatttgccattcctgaaacaaatcatcgaaaagcgggaggctaagcttaaaaggattcccactgatgttctctatgcccttccaacaacgttattgtattctttggaaggtttacaagaaatagtagactggcagaaaataatgaaacttcaatccaaggatggatcatttctcagctctccggcatctacagcggctgtattcatgcgtacagggaacaaaaagtgcttggatttcttgaactttgtcttgaagaaattcggaaaccatgtgccttgtcactatccgcttgatctatttgaacgtttgtgggcggttgatacagttgagcggctaggtatcgatcgtcatttcaaagaggagatcaaggaagcattggattatgtttacagccattgggacgaaagaggcattggatgggcgagagagaatcctgttcctgatattgatgatacagccatgggccttcgaatcttgagattacatggatacaatgtatcctcagatgttttaaaaacatttagagatgagaatggggagttcttttgcttcttgggtcaaacacagagaggagttacagacatgttaaacgtcaatcgttgttcacatgtttcatttccgggagaaacgatcatggaagaagcaaaactctgtaccgaaaggtatctgaggaatgctctggaaaatgtggatgcctttgacaaatgggcttttaaaaagaatattcggggagaggtagagtatgcactcaaatatccctggcataagagtatgccaaggttggaggctagaagctatattgaaaactatgggccagatgatgtgtggcttggaaaaactgtatatatgatgccatacatttcgaatgaaaagtatttagaactagcgaaactggacttcaataaggtgcagtctatacaccaaacagagcttcaagatcttcgaaggtggtggaaatcatccggtttcacggatctgaatttcactcgtgagcgtgtgacggaaatatatttctcaccggcatcctttatctttgagcccgagttttctaagtgcagagaggtttatacaaaaacttccaatttcactgttattttagatgatctttatgacgcccatggatctttagacgatcttaagttgttcacagaatcagtcaaaagatgggatctatcactagtggaccaaatgccacaacaaatgaaaatatgttttgtgggtttctacaatacttttaatgatatagcaaaagaaggacgtgagaggcaagggcgcgatgtgctaggctacattcaaaatgtttggaaagtccaacttgaagcttacacgaaagaagcagaatggtctgaagctaaatatgtgccatccttcaatgaatacatagagaatgcgagtgtgtcaatagcattgggaacagtcgttctcattagtgctcttttcactggggaggttcttacagatgaagtactctccaaaattgatcgcgaatctagatttcttcaactcatgggcttaacagggcgtttggtgaatgacaccaaaacttatcaggcagagagaggtcaaggtgaggtggcttctgccatacaatgttatatgaaggaccatcctaaaatctctgaagaagaagctctacaacatgtctatagtgtcatggaaaatgccctcgaagagttgaatagggagtttgtgaataacaaaataccggatatttacaaaagactggtttttgaaactgcaagaataatgcaactcttttatatgcaaggggatggtttgacactatcacatgatatggaaattaaagagcatgtcaaaaattgcctcttccaaccagttgcctagattaaattattcagttaaaggccctcatggtattgtgttaacattataataacagatgctcaaaagctttgagcggtatttgttaaggctatctttgtttgtttgtttgtttactgccaaccaaaaagcgttcctaaacctttgaagacatttccatccaagagatggagtctacattttatttatgagattgaattatttcaagagaatatactacatatatttaaaagtaaaaaaaaaaaaaaaaaaaaa

SEQ ID NO: 62 - protein, 868 aa, Abies grandis
MAMPSSSLSSQIPTAAHHLTANAQSIPHFSTTLNAGSSASKRRSLYLRWGKGSNKIIACVGEGGATSVPYQSAEKNDSLSSSTLVKREFPPGFWKDDLIDSLTSSHKVAASDEKRIETLISEIKNMFRCMGYGETNPSAYDTAWVARIPAVDGSDNPHFPETVEWILQNQLKDGSWGEGFYFLAYDRILATLACIITLTLWRTGETQVQKGIEFFRTQAGKMEDEADSHRPSGFEIVFPAMLKEAKILGLDLPYDLPFLKQIIEKREAKLKRIPTDVLYALPTTLLYSLEGLQEIVDWQKIMKLQSKDGSFLSSPASTAAVFMRTGNKKCLDFLNFVLKKFGNHVPCHYPLDLFERLWAVDTVERLGIDRHFKEEIKEALDYVYSHWDERGIGWARENPVPDIDDTAMGLRILRLHGYNVSSDVLKTFRDENGEFFCFLGQTQRGVTDMLNVNRCSHVSFPGETIMEEAKLCTERYLRNALENVDAFDKWAFKKNIRGEVEYALKYPWHKSMPRLEARSYIENYGPDDVWLGKTVYMMPYISNEKYLELAKLDFNKVQSIHQTELQDLRRWWKSSGFTDLNFTRERVTEIYFSPASFIFEPEFSKCREVYTKTSNFTVILDDLYDAHGSLDDLKLFTESVKRWDLSLVDQMPQQMKICFVGFYNTFNDIAKEGRERQGRDVLGYIQNVWKVQLEAYTKEAEWSEAKYVPSFNEYIENASVSIALGTVVLISALFTGEVLTDEVLSKIDRESRFLQLMGLTGRLVNDTKTYQAERGQGEVASAIQCYMKDHPKISEEEALQHVYSVMENALEELNREFVNNKIPDIYKRLVFETARIMQLFYMQGDGLTLSHDMEIKEHVKNCLFQPVA

SEQ ID NO: 63 - DNA, 2592 bp, Picea abies
catttgttgagatggccttgctttcgtcttcattgtcatcccagattccaactggagctcatcatctcactctcaatgcttatgcgaacacacagtgcattccacatttcttcagcacgcttaatgcaggaaccagtgctggcaaacggagcagcttgtacctacgatggggtaaaggttcaaacaagatcattgcttgtgtcggagaagattcgctttcggctcctacactcgtaaaacgagaatttcctccaggtttttggaaggaccatgttatcgattctctaacgtcatctcacaaggttgcagcatcagacgagaagcgtatcgagacattaatatcagagattaagaatatgtttagatctatgggctacggggatactaatccgtctgcatatgacactgcttgggtagcaaggattccggcagttgatggctctgagcagcctgagtttcctgagacacttgaatggattcttcaaaatcagttgaaagatggctcttggggtgaaggattctacttcttggcatatgacagaatactggctacacttgcatgtattattactcttaccctatggcggactggggagatacaagtccaaaaaggtattgaatttttcaagacacaagctggaaaaatagaggatgaagctgatagtcacagaccaagtggatttgaaatagtatttcctgcaatgctaaaagaagctaaagtcttaggtttggatctgccttacgaattgcctttcatcaaacaaatcattgaaaagcgggaggctaagcttgaaaggctacctacgaatattctctatgcccttccaacaaccttactgtattctctggaaggcctgcaagaaatagtagactggcagaaaataatcaaacttcaatccaaggatggatcattcctcagctcgccagcatctacagcggcagtgttcatgcgtacagggaacaaaaagtgcttggaattcttaaatttcgtcttgaagaaattcggaaaccatgtgccttgtcactatccgcttgatctatttgaacgtctgtgggccgttgatactattgagaggctagggatcgatcgccatttcaaagaggagatcaaggacgcattggattatgtttacagccattgggacgaaagaggcattggatgggcgagagagaatcctgtccctgatattgatgatacagccatgggccttcgaatcttgaggctgcatggatacaatgtatcctcagatgttctaaaaacctttagagatgagaatggggagttcttttgcttcttgggtcaaacacagagaggagttacagacatgttgaacgtcaatcgctgttcacacgtcgcatttccgggagaaacgatcatggaagaagcaaaaacctgtaccgaaaggtatctgaggaatgctctggaagatgtgggtgcctttgacaaatgggctcttaaaaagaatattcggggagaggtggaatatgcactcaaatatccgtggcatagaagtatgccaaggctggaggctagaagctacattgaacattatggacccaatgatgtctggcttgggaaaactatgtatatgatgccatacatttccaacgaaaaatatttggaattagcgaaattggacttcaatcatgtgcaatctctacaccaaaaagagcttcgagatcttcggaggtggtggacatcatcgggtttcacagagctgaagttcactcgggagcgtgtaactgaaatatatttctcaccggcgtcttttatgtttgagcctgagttcgctacctgcagagccgtttatacaaaaacttctaatttcacagtcattttagatgatctttatgacgcgcatggaactctggacgatctcaagttgttttccgattctgttaaaaaatgggatctatcactagtagatcgaatgccacaagacatgaaaatatgtttcatgggtttctacaatacatttaatgaaatcgcggaagaaggacgcaagaggcaggggcgtgacgtgctaggctatattcgaaatgtttgggagatccagctagaagcgtatacgaaagaagcagagtggtccgcagctagatatgtgccgtcttttgatgaatacatagataacgcgagtgtatcaatagcgctgggaacagtggttctcatcagcgctcttttcactggggagattcttacagatgatgtactctccaaaattggtcgcggatccagatttttacaactcatgggcttgacagggcgtctggtgaacgacaccaaaacttatgaggccgagagaggtcaaggcgaggtggcttccgccgtacagtgttatatgaaggaccatcctgaaatctcggaagaagaagctctcaaacatgtctacactgtcatggaaaacgctctggatgagttgaatagggagtttgtgaataacagagaagtgccggacagttgcaggagactggtttttgaaaccgcgagaataatgcagttgttttacatggacggagacggtttgacactctcacatgagacggaaattaaggagcatgtcaaaaattgcctcttccaacccgttgcttaga

SEQ ID NO: 64 - protein, 859 aa, Picea abies
MALLSSSLSSQIPTGAHHLTLNAYANTQCIPHFFSTLNAGTSAGKRSSLYLRWGKGSNKIIACVGEDSLSAPTLVKREFPPGFWKDHVIDSLTSSHKVAASDEKRIETLISEIKNMFRSMGYGDTNPSAYDTAWVARIPAVDGSEQPEFPETLEWILQNQLKDGSWGEGFYFLAYDRILATLACIITLTLWRTGEIQVQKGIEFFKTQAGKIEDEADSHRPSGFEIVFPAMLKEAKVLGLDLPYELPFIKQIIEKREAKLERLPTNILYALPTTLLYSLEGLQEIVDWQKIIKLQSKDGSFLSSPASTAAVFMRTGNKKCLEFLNFVLKKFGNHVPCHYPLDLFERLWAVDTIERLGIDRHFKEEIKDALDYVYSHWDERGIGWARENPVPDIDDTAMGLRILRLHGYNVSSDVLKTFRDENGEFFCFLGQTQRGVTDMLNVNRCSHVAFPGETIMEEAKTCTERYLRNALEDVGAFDKWALKKNIRGEVEYALKYPWHRSMPRLEARSYIEHYGPNDVWLGKTMYMMPYISNEKYLELAKLDFNHVQSLHQKELRDLRRWWTSSGFTELKFTRERVTEIYFSPASFMFEPEFATCRAVYTKTSNFTVILDDLYDAHGTLDDLKLFSDSVKKWDLSLVDRMPQDMKICFMGFYNTFNEIAEEGRKRQGRDVLGYIRNVWEIQLEAYTKEAEWSAARYVPSFDEYIDNASVSIALGTVVLISALFTGEILTDDVLSKIGRGSRFLQLMGLTGRLVNDTKTYEAERGQGEVASAVQCYMKDHPEISEEEALKHVYTVMENALDELNREFVNNREVPDSCRRLVFETARIMQLFYMDGDGLTLSHETEIKEHVKNCLFQPVA

SEQ ID NO: 65 - DNA, 2553 bp, Pinus taeda
atggccttgccttcctcttcattgtcatcccagattcatactggagctaccacacaatgcattccacatttccacggctcgcttaatgcaggaaccagtgctggcaaacgaagaagcttgtacctacgatggggtaaaggtccaagcaagatcgttgcttgtgctggacaagatccgttttcagttcctacactggtgaaacgagaatttcctccaggtttctggaaggatcatgttatcgaatctctaatgccatcttacaaggttgcaccatcagacgagaagcgtatcgagacattaataaccgagattaagaatatgtttcgatctatgggctatggggaaactaatccctctgcatatgacactgcttgggtagcaaggattccagcagttgatggctctgagaagcctcagtttcccgagacactagaatggattcttcaaaatcagttgaaagatggctcttggggtgaagaattctatttcttggcatatgacaggatactagctactcttgcttgtattattactcttactatatggcagactggggacacacaagtacaaaaagggattgaatttttcaagacacaagctggaaaaatagaagaggaggctgatagccacaggccaagtggatttgaaatagtatttcctgcaatgctaaaagaagctaaagccttaggtctggctctgccttatgaattgcctttcatccagcaaatcattgaaaagcgggaggctaagcttcaaaggcttcctcctgatcttctctatgccttaccaacaacgttactgtattctttggaaggcctgcaagaaatagtagactgggagaaaataatgaaacttcaatccaaggatgggtcattcctcagctcgccagcatctacagcggctgtgttcatgcgtacagggaacaaaaaatgcttggaattcttgaattttgtcttgaagaaattcggaaaccatgttccttgtcactatccgcttgatctctttgaacgtctgtgggccgttgatactgttgagaggctagggatcgatcaccatttcaaagaggagatcaaggacgcattggattatgtttacagccactgggacgaaagaggaattggatgggcgagagagaatcctgtccctgatatcgatgatacagccatgggccttcgaatcttgagactgcatggatacaatgtatcctcagatgttttaaaaacttttagagatgagaatggagagttcttctgcttcttgggtcaaacacagagaggagttacagacatgttaaatgtcaatcgttgttcacacgttgcatttccgggagaaaccatcatggaagaagcaaaactctgtaccgaaaggtatctgaggaatgctctggaggatgggggcgcctctgacaaatgggctcttaaaaagaatattcggggagaggtggaatacgcactcaaatatccctggcatagaagtatgccaaggctggaggctagaagctacattgaaaattatggaccaaatgatgtctggctcggaaaaactatgtatatgatgccaaacatttccaacgaaaaatacttggaattagcaaaattggacttcaatcgtgtgcaatttttccacagacaggagcttcaagatattcggaggtggtggaattcatcgggtttctcacagctgggcttcactcgggaacgtgtggctgaaatatatttttcaccagcgtcatttttgtttgagccagagttcgcaacctgcagagccgtttacacaaaaacttctaatttcacagtcatattagatgatctttatgacgctcatggaactctggacaatctcaagttgttttcagaatctgtgaaaagatgggatctatctttggtagatcaaatgccacaagacatgaaaatatgttttaagggtttttacaatacttttaatgaaatcgctgaagaagggcgaaaaaggcaggggcgtgatgtgctaagttatattcaaaaagtttgggaggtccagctagaagcatataccaaagaagcagaatggtctgcagtgagatacgtgccatcctatgatgaatatatagggaacgcgagtgtttcaatagcattgggaacagtggttcttatcagcgctctttttactggggagattcttacagatgacatactctccaaaattggtcgcgattccagatttctatacctcatgggcttgacagggcgtctcgtgaatgacaccaaaacttatcaggctgagagaggtcaaggtgaggtggcttctgcagtacaatgttacatgaaggaccatcctgagatctccgaagaagaagctctcaaacatgtctatactatcatggataatgctcttgatgagttgaatagagagtttgtgaataacagagatgtgcccgacacttgcaggagattggtttttgaaacggcgagaataatgcaattgttttacatggatggagacggtttgacactttcacataatatggaaattaaggagcatgtcaaaaactgcctcttccagccggttgcttag

SEQ ID NO: 66 - protein, 850 aa, Pinus taeda
MALPSSSLSSQIHTGATTQCIPHFHGSLNAGTSAGKRRSLYLRWGKGPSKIVACAGQDPFSVPTLVKREFPPGFWKDHVIESLMPSYKVAPSDEKRIETLITEIKNMFRSMGYGETNPSAYDTAWVARIPAVDGSEKPQFPETLEWILQNQLKDGSWGEEFYFLAYDRILATLACIITLTIWQTGDTQVQKGIEFFKTQAGKIEEEADSHRPSGFEIVFPAMLKEAKALGLALPYELPFIQQIIEKREAKLQRLPPDLLYALPTTLLYSLEGLQEIVDWEKIMKLQSKDGSFLSSPASTAAVFMRTGNKKCLEFLNFVLKKFGNHVPCHYPLDLFERLWAVDTVERLGIDHHFKEEIKDALDYVYSHWDERGIGWARENPVPDIDDTAMGLRILRLHGYNVSSDVLKTFRDENGEFFCFLGQTQRGVTDMLNVNRCSHVAFPGETIMEEAKLCTERYLRNALEDGGASDKWALKKNIRGEVEYALKYPWHRSMPRLEARSYIENYGPNDVWLGKTMYMMPNISNEKYLELAKLDFNRVQFFHRQELQDIRRWWNSSGFSQLGFTRERVAEIYFSPASFLFEPEFATCRAVYTKTSNFTVILDDLYDAHGTLDNLKLFSESVKRWDLSLVDQMPQDMKICFKGFYNTFNEIAEEGRKRQGRDVLSYIQKVWEVQLEAYTKEAEWSAVRYVPSYDEYIGNASVSIALGTVVLISALFTGEILTDDILSKIGRDSRFLYLMGLTGRLVNDTKTYQAERGQGEVASAVQCYMKDHPEISEEEALKHVYTIMDNALDELNREFVNNRDVPDTCRRLVFETARIMQLFYMDGDGLTLSHNMEIKEHVKNCLFQPVA

SEQ ID NO: 67 - DNA, 2898 bp, Pinus densiflora
atctcattgagttcgatctctgcaactcggtgaagatggccttgccttcctcttcattgtcatctcagattcatactggagctaccacacaatgcattccacatttccacagctcgcttaatgcaggaaccagtgctggcaaacgaagaagcttgtacctacgatggggtaaagataaccaggcaaaaaaactgggtccaagcaagatcgttgcttgtgctggacaagatccgttttcagttcccacactagtgaaacgagaatttcctccaggtttctggaaggatcatgttatcgaatctctaatgccatcttacaaggttgcaccatcagacgagaagcgtatcgagacattaatatccgagattaagaatatgtttcgatctatgggctatggggaaactaatccctctgcatatgatactgcttgggtggcaaggattccagcagttgatggctctgagaagcctcagtttcctgagacactagaatggattcttcaaaatcagttgaaagatggctcttggggtgaagaattctatttcttggcatacgacaggatactagctactcttgcgtgtattattactcttactatatggcagactggggacacacaagtacaaaaagggattgaatttttcaagactcaagctggaaaaatagaggaggaggctgatagccacaggccaagtggatttgaaatagtatttcctgcaatgctaaaagaagctaaagccttaggtctggatctgccttacgaattgcctttcatccagcaaatcactgaaaagcgggaggctaagcttcaaaggcttcctcctgatcttctctatgccttaccaacaacgttactgtattctttggaaggcctgcaagaaatagtagactgggagaaaataatgaaacttcaatccaaggatgggtcatccctcagctcgccagcatctacagcggctgtgttcatgcgtacagggaacaaaaaatgcttggaattcttgaattttgtcttgaagaaattcggaaaccatgttccttgtcactatccgcttgatctatttgaacgtctgtgggccgttgatactgttgagaggctagggatcgatcaccatttcaaagaggagatcaaggacgcattggattatgtttacagccactgggacgaaagaggaattggatgggcgagagagaatcctgtccctgatatcgatgatgatacagccatgggccttcgaatcttgagactgcatgggtacaatgtatcctcagatgttttaaaaacttttagagatgagaatggagagttcttctgcttcttgggtcaaacacagagaggagttacagacatgttaaatgtcaatcgttgttcacacgttgcatttccgggagaaaccatcctggaagaagcaaaactctgtaccgaacggtatctgaggaatgctctggaggatgcgggcgcctttgacaaatgggctcttaaaaagaatattcggggagaggtggaatacgcactcgaatatccctggcatagaagtatgccaaggctggaggctagaagttacattgaaaattatggaccaaatgatgtctggctcggaaaaactatgtatatgatgccaaacatttccaacgaaaaatacttggaattagcaaaactggacttcaatcgtgtgcaatttttacacagacaggagcttcaagatattcggaggtggtggaattcatcaggtttctcagagctgggcttcactcgggaacgtgtggctgaaatatatttttcaccagcatcatttttgtttgagccagagttcgctacctgcagagccgtttacacaaaaacttctaatttcacagttatattagatgatctttatgacgctcatggaactttggacaatctcaagttgttttcagaatctgtgaaaagatgggatctatccttggtagatcagatgccacaagacatgaaaatatgttttaagggtttttacaatacttttaatgaaatagctgaagaagggcggaaaaggcaggggcgtgatgtgctaggttacattcgaaaagtttgggaggtccagctaggagcgtataccaaagaagcagaatggtctacggctagatatgtgccgtcctatgatgaatatatagagaacgcgagtgtttcaatagcattgggaacggtggctctcatcagagctcttttcaccggggagattcttacagatgatatactctccaaaattggtcgggattccaaattcctatacctcatgggctcgacagggcgttttgtgaacgcccccaaaacttatcaccctgagagaggtcaaggagaggggggttttgcggtacaatgttacatgaaggaccatcccggaatttccgaagaagaagctctcaaacatgtttatagtttcatggataatgcttttgatgagttgaaaagagagtttgtgaataacagagatgtgcccgccccttgcagggggggggtttttgaaacggggggaataatgcagttgttttacatggaggggggcggtttgaccctttcccctgatatggaaattaaggggcatgtcaaaaactcccttttccccccggttgcttagattcaatttttgagttgaaggcccttcctgacgttgtgttaacgttataataacggggggataggagttgttgcctagtattggtatttgttagaggttttttttttttttagtacaagccctgaggtgttcctaaagagacattgccctcaaacagagggattcaacattttttggtttccaattttttttacataaaatataacttttttggaaaattttttttccaaagtaaaaaaaaaaaaaaaaaaaaaaaaaaaaaaaaaaaaaaaaaaaaaaaaaaaaa

SEQ ID NO: 68 - protein, 858 aa, Pinus densiflora
MALPSSSLSSQIHTGATTQCIPHFHSSLNAGTSAGKRRSLYLRWGKDNQAKKLGPSKIVACAGQDPFSVPTLVKREFPPGFWKDHVIESLMPSYKVAPSDEKRIETLISEIKNMFRSMGYGETNPSAYDTAWVARIPAVDGSEKPQFPETLEWILQNQLKDGSWGEEFYFLAYDRILATLACIITLTIWQTGDTQVQKGIEFFKTQAGKIEEEADSHRPSGFEIVFPAMLKEAKALGLDLPYELPFIQQITEKREAKLQRLPPDLLYALPTTLLYSLEGLQEIVDWEKIMKLQSKDGSSLSSPASTAAVFMRTGNKKCLEFLNFVLKKFGNHVPCHYPLDLFERLWAVDTVERLGIDHHFKEEIKDALDYVYSHWDERGIGWARENPVPDIDDDTAMGLRILRLHGYNVSSDVLKTFRDENGEFFCFLGQTQRGVTDMLNVNRCSHVAFPGETILEEAKLCTERYLRNALEDAGAFDKWALKKNIRGEVEYALEYPWHRSMPRLEARSYIENYGPNDVWLGKTMYMMPNISNEKYLELAKLDFNRVQFLHRQELQDIRRWWNSSGFSELGFTRERVAEIYFSPASFLFEPEFATCRAVYTKTSNFTVILDDLYDAHGTLDNLKLFSESVKRWDLSLVDQMPQDMKICFKGFYNTFNEIAEEGRKRQGRDVLGYIRKVWEVQLGAYTKEAEWSTARYVPSYDEYIENASVSIALGTVALIRALFTGEILTDDILSKIGRDSKFLYLMGSTGRFVNAPKTYHPERGQGEGGFAVQCYMKDHPGISEEEALKHVYSFMDNAFDELKREFVNNRDVPAPCRGGVFETGGIMQLFYMEGGGLTLSPDMEIKGHVKNSLFPPVA

SEQ ID NO: 69 - DNA, 1446 bp, Pinus taeda
atggcagaccaaatatcattactgctggtggtgttcaccgcagcggtggcgctcctccaccttatttacaggtggtggaacgcccagagaggccagaaaaggacgagtaatgagaagaatcaggagctccatctaccacctggttcgactggatggccgctgattggggaaacctacagttattatcgctccatgaccagcaatcgccccaggcaattcatcgacgacagagagaaaagatacgattcggacgttttcgtatctcatttatttggaagccaagcagttatatcatcggatccccagttcaacaagtatgttctgcaaaacgaggggaggtttttccaagctcattacccaaaggcactgaaagctttgataggcgattacgggctgctctcggtgcatggcgatctgcaaaggaagctccacggaatagctgtgaatttgctgaggtttgagaggctgaaattcgatttcatggaggaaatccagaatctcgttcattccacgctagatagatgggtagacaagaaggaaatagctctgcagaatgaatgtcaccagatggttctcaacttgatggccaaacaactgctcgatttatctccttccaaagagacaaatgagatttgcgagctattcgttgactataccaatgcagtgatcgccattcccatcaaaattcctggttctacttatgcaaagggactcaaggcaagggagctcctcataagaaagatttccaacatgataaaagagagaagggatcatcctcatattgttcacaaagatctgttaactaaacttttggaagaagactctatttctgatgaaataatttgtgattttatattattcttgctctttgctggacatgagacttcttctagagccatgacatttgctatcaagtttctcacaacttgtcccaaagcattgactcaaatgaaagaagaacatgatgctatattaaaagccaaaggcggtcataagaaattggagtgggatgattataaatcaatgaaattcactcaatgtgttataaatgaaacacttcgactaggtaactttggccctggggtgtttagagaaactaaagaagacactaaagtgaaagattgtctcattccaaaaggatgggtggtgtttgcttttttgactgcaacccatctagatgaaaagttccacaatgaagctcttacatttaatccatggagatgggaattggatcaagatgtatcgaataatcacttattttcaccttttggagggggagctaggctttgtccagggtcccatcttgctaggcttgaattggcacttttccttcacatatttatcacaagattcagatgggaagcacttgctgatgaacatccctcatattttccattaccttatttagctaaaggctttcctatgcgcctttataatagagaatga

SEQ ID NO: 70 - protein, 481 aa, Pinus taeda
MADQISLLLVVFTAAVALLHLIYRWWNAQRGQKRTSNEKNQELHLPPGSTGWPLIGETYSYYRSMTSNRPRQFIDDREKRYDSDVFVSHLFGSQAVISSDPQFNKYVLQNEGRFFQAHYPKALKALIGDYGLLSVHGDLQRKLHGIAVNLLRFERLKFDFMEEIQNLVHSTLDRWVDKKEIALQNECHQMVLNLMAKQLLDLSPSKETNEICELFVDYTNAVIAIPIKIPGSTYAKGLKARELLIRKISNMIKERRDHPHIVHKDLLTKLLEEDSISDEIICDFILFLLFAGHETSSRAMTFAIKFLTTCPKALTQMKEEHDAILKAKGGHKKLEWDDYKSMKFTQCVINETLRLGNFGPGVFRETKEDTKVKDCLIPKGWVVFAFLTATHLDEKFHNEALTFNPWRWELDQDVSNNHLFSPFGGGARLCPGSHLARLELALFLHIFITRFRWEALADEHPSYFPLPYLAKGFPMRLYNRE

SEQ ID NO: 71 - DNA, 2570 bp, Arabidopsis thaliana
cttcttcactaaatacttagacagagaaaacagagctttttaaagccatgtctcttcagtatcatgttctaaactccattccaagtacaacctttctcagttctactaaaacaacaatatcttcttctttccttaccatctcaggatctcctctcaatgtcgctagagacaaatccagaagcggttccatacattgttcaaagcttcgaactcaagaatacattaattctcaagaggttcaacatgatttgcctctaatacatgagtggcaacagcttcaaggagaagatgctcctcagattagtgttggaagtaatagtaatgcattcaaagaagcagtgaagagtgtgaaaacgatcttgagaaacctaacggacggggaaattacgatatcggcttacgatacagcttgggttgcattgatcgatgccggagataaaactccggcgtttccctccgccgtgaaatggatcgccgagaaccaactttccgatggttcttggggagatgcgtatctcttctcttatcatgatcgtctcatcaatacccttgcatgcgtcgttgctctaagatcatggaatctctttcctcatcaatgcaacaaaggaatcacgtttttccgggaaaatattgggaagctagaagacgaaaatgatgagcatatgccaatcggattcgaagtagcattcccatcgttgcttgagatagctcgaggaataaacattgatgtaccgtacgattctccggtcttaaaagatatatacgccaagaaagagctaaagcttacaaggataccaaaagagataatgcacaagataccaacaacattgttgcatagtttggaggggatgcgtgatttagattgggaaaagctcttgaaacttcaatctcaagacggatctttcctcttctctccttcctctaccgcttttgcattcatgcagacccgagacagtaactgcctcgagtatttgcgaaatgccgtcaaacgtttcaatggaggagttcccaatgtctttcccgtggatcttttcgagcacatatggatagtggatcggttacaacgtttagggatatcgagatactttgaagaagagattaaagagtgtcttgactatgtccacagatattggaccgacaatggcatatgttgggctagatgttcccatgtccaagacatcgatgatacagccatggcatttaggctcttaagacaacatggataccaagtgtccgcagatgtattcaagaactttgagaaagagggagagtttttctgctttgtggggcaatcaaaccaagcagtaaccggtatgttcaacctataccgggcatcacaattggcgtttccaagggaagagatattgaaaaacgccaaagagttttcttataattatctgctagaaaaacgggagagagaggagttgattgataagtggattataatgaaagacttacctggcgagattgggtttgcgttagagattccatggtacgcaagcttgcctcgagtagagacgagattctatattgatcaatatggtggagaaaacgacgtttggattggcaagactctttataggatgccatacgtgaacaataatggatatctggaattagcaaaacaagattacaacaattgccaagctcagcatcagctcgaatgggacatattccaaaagtggtatgaagaaaataggttaagtgagtggggtgtgcgcagaagtgagcttctcgagtgttactacttagcggctgcaactatatttgaatcagaaaggtcacatgagagaatggtttgggctaagtcaagtgtattggttaaagccatttcttcttcttttggggaatcctctgactccagaagaagcttctccgatcagtttcatgaatacattgccaatgctcgacgaagtgatcatcactttaatgacaggaacatgagattggaccgaccaggatcggttcaggccagtcggcttgccggagtgttaatcgggactttgaatcaaatgtcttttgaccttttcatgtctcatggccgtgacgttaacaatctcctctatctatcgtggggagattggatggaaaaatggaaactatatggagatgaaggagaaggagagctcatggtgaagatgataattctaatgaagaacaatgacctaactaacttcttcacccacactcacttcgttcgtctcgcggaaatcatcaatcgaatctgtcttcctcgccaatacttaaaggcaaggagaaacgatgagaaggagaagacaataaagagtatggagaaggagatggggaaaatggttgagttagcattgtcggagagtgacacatttcgtgacgtcagcatcacgtttcttgatgtagcaaaagcattttactactttgctttatgtggcgatcatctccaaactcacatctccaaagtcttgtttcaaaaagtctagtaacctcatcatcatcatcgatccattaacaatcagtggatcgatgtatccatagatgcgtgaataatatttcatgtagagaaggagaacaaattagatcatgtagggttatca

SEQ ID NO: 72 - protein, 802 aa, Arabidopsis thaliana
MSLQYHVLNSIPSTTFLSSTKTTISSSFLTISGSPLNVARDKSRSGSIHCSKLRTQEYINSQEVQHDLPLIHEWQQLQGEDAPQISVGSNSNAFKEAVKSVKTILRNLTDGEITISAYDTAWVALIDAGDKTPAFPSAVKWIAENQLSDGSWGDAYLFSYHDRLINTLACVVALRSWNLFPHQCNKGITFFRENIGKLEDENDEHMPIGFEVAFPSLLEIARGINIDVPYDSPVLKDIYAKKELKLTRIPKEIMHKIPTTLLHSLEGMRDLDWEKLLKLQSQDGSFLFSPSSTAFAFMQTRDSNCLEYLRNAVKRFNGGVPNVFPVDLFEHIWIVDRLQRLGISRYFEEEIKECLDYVHRYWTDNGICWARCSHVQDIDDTAMAFRLLRQHGYQVSADVFKNFEKEGEFFCFVGQSNQAVTGMFNLYRASQLAFPREEILKNAKEFSYNYLLEKREREELIDKWIIMKDLPGEIGFALEIPWYASLPRVETRFYIDQYGGENDVWIGKTLYRMPYVNNNGYLELAKQDYNNCQAQHQLEWDIFQKWYEENRLSEWGVRRSELLECYYLAAATIFESERSHERMVWAKSSVLVKAISSSFGESSDSRRSFSDQFHEYIANARRSDHHFNDRNMRLDRPGSVQASRLAGVLIGTLNQMSFDLFMSHGRDVNNLLYLSWGDWMEKWKLYGDEGEGELMVKMIILMKNNDLTNFFTHTHFVRLAEIINRICLPRQYLKARRNDEKEKTIKSMEKEMGKMVELALSESDTFRDVSITFLDVAKAFYYFALCGDHLQTHISKVLFQKV

SEQ ID NO: 73 - DNA, 2496 bp, Triticum aestivum
atgatgcagctccacctcctgccgccggcgtgggtgccgtcgggctacggtggccacggaccacgcccgcgcgccctcgccgtcaaaggtccatgccgtttcagcggcaaaggagatgccacccttgtggaaaccgccggctcacgcgtcgctctccagattgcgcaggccaccagcgtatcaagtgctaaagtgttgcaaacaaaccttgtcagaaatgatattcagattctagaacggaccgaggaaccatgtgacctcgacgactactgtgtgattcctggggcggagtttgggcagccactggtcaaccaagtgaggatgatgctgggatcgatgagtgatggcgagatcagcgtgtcggcatacgacactgcctgggtcgccctggtgccgaggcttgatgacggcgatagcccccagttccccgccaccctccagtggattctcgacaaccagctcccagacggctcctggggagacgctgccctgttctccgcctacgaccggatcaccaacacccttgcctgtgttgtggctctcacaaagtggtctcttggccctgataaatgcagtagagggctctcttttctggaagagaacatgtggaggctagcagaggaagacctggagtcgatgcccatcggcttcgagattgcgtttccttctctcctggaggtggccaagagcttgggcattgggttcccgtatgatcaccatgctctgcagcgcatatatgccaacagagaagtgaagctcaagaggattccgatggagatgatgcacagaatcccaacgacgatcctgcattcccttgaaggaatgcccggggtggactggcacaagatcctcaggctccagtctagtgatgggtccttcctctattctccttcggctacagcctttgctctcaagcaaactggtgacgcaaaatgcttcgagtacatcgacagaatcgtcaagaaattcaatggaggagttcccaatgtttacccggttgatctctttgaacacatctgggtcgtcgaccggctggagcgtcttggaatctcacgctacttcaagcaagaaattaaacagtgcttggactatgtccacaggcactggactgaagatgggatatgctgggcaaggaactccgctgtaagagacgtggatgacacagccatggccttccggctgctgcggctgcatggatacaccgtctcaccgagtgtatttgagaactttgagaaggacggggagttcttctgtttcgcggggcaatcaacgcaagcagtcactgggatgtacaacctgaacagggcctctcagctaagattccctggagaggatgtgttgcagcgtgcagggagattctcgtatgcgttccttagagaaagggaagcccagggcacgattcgagacaaatggatcattgctaaggatctaccaggcgaggtaaaatatacactggacttcccatggtatgcaagcttaccgcgtgtagaagcaagggcctacctagatcaatatggtggtgagaatgatgtctggattggaaagacactctacaggatgccacttgtgaacaacaacacctatcttgagttggcaaagcgtgatttcaatcgctgccaagtccaacatcagcttgagtggcatggcctacaaaagtggtttattgagaatggcctcgagacttttggggtggctttaagagatgttctgagagcttattttctagctgctgcttgcattttcgaaccaagccgtgccacagagcgacttgcatgggccaaggtgtcagtgctggccaacattattactaaatatcttcatagtgatctgtcgggtaatgaaatgatggaacggtttatgcacggcggtctccatgaaggaaatagtactatatcatggcgtaaaggagatgcaaaaggggacatccttctgggggcacttcagcagtttattgatttattggcacaagagacactacctgttggtggaggaccagtgtacatcaacaatctgttacgctgtgcttggattgaatggatgatgcaactgataaatagagaggatgacacatacgattcaagtgttattcaggcagggtcgtgcatggttcacgataaacaaacatgtttgctttctagtcaaattgttgagatttgtggtggacgaaccgctgaagcatcatcgatgataaacagcatggatggcgcttgctttattcaacttgcgtcatctatttgcgacaaccttcaccacaagatgttactttctcaggacaccaaaacgaacgagacggcgatgagccacatgaacgagaaaatcgaggcgggcatgcaggaactcacccagaaatttctccagacgcacgacgatgggacgagcagcgagacgaagcgaaccttgttgagcgtcgtgagaagctgttactacgcggctaactgccctcaccatgtatttgatagacatgtttcgaaggtcattttcgaacatgtgttttga

SEQ ID NO: 74 - protein, 831 aa, Triticum aestivum
MMQLHLLPPAWVPSGYGGHGPRPRALAVKGPCRFSGKGDATLVETAGSRVALQIAQATSVSSAKVLQTNLVRNDIQILERTEEPCDLDDYCVIPGAEFGQPLVNQVRMMLGSMSDGEISVSAYDTAWVALVPRLDDGDSPQFPATLQWILDNQLPDGSWGDAALFSAYDRITNTLACVVALTKWSLGPDKCSRGLSFLEENMWRLAEEDLESMPIGFEIAFPSLLEVAKSLGIGFPYDHHALQRIYANREVKLKRIPMEMMHRIPTTILHSLEGMPGVDWHKILRLQSSDGSFLYSPSATAFALKQTGDAKCFEYIDRIVKKFNGGVPNVYPVDLFEHIWVVDRLERLGISRYFKQEIKQCLDYVHRHWTEDGICWARNSAVRDVDDTAMAFRLLRLHGYTVSPSVFENFEKDGEFFCFAGQSTQAVTGMYNLNRASQLRFPGEDVLQRAGRFSYAFLREREAQGTIRDKWIIAKDLPGEVKYTLDFPWYASLPRVEARAYLDQYGGENDVWIGKTLYRMPLVNNNTYLELAKRDFNRCQVQHQLEWHGLQKWFIENGLETFGVALRDVLRAYFLAAACIFEPSRATERLAWAKVSVLANIITKYLHSDLSGNEMMERFMHGGLHEGNSTISWRKGDAKGDILLGALQQFIDLLAQETLPVGGGPVYINNLLRCAWIEWMMQLINREDDTYDSSVIQAGSCMVHDKQTCLLSSQIVEICGGRTAEASSMINSMDGACFIQLASSICDNLHHKMLLSQDTKTNETAMSHMNEKIEAGMQELTQKFLQTHDDGTSSETKRTLLSVVRSCYYAANCPHHVFDRHVSKVIFEHVF

SEQ ID NO: 75 - DNA, 2274 bp, Triticum aestivum
atgctgacattcactgctgcactccggcatgttccagtgctcgaccagccgacgtccgagccatggcggcgactttccctgcacctgcactctcagcgtcgaccatgtggattggtgctaattagcaaatcgccatcctatccggaggtagatgtgggtgaatggaaagttgatgagtacagacaacgcacggatgaaccgagcgagacgcgacaaatgatcgatgacataagaacggccctggcgtcattgggtgatgatgagacgtcaatgagtgtttcagcctacgacacagcgttggtcgcccttgtcaagaaccttgacggaggtgatggaccgcaatttccctcgtgcatcgactggattgttcaaaatcaactaccagatggttcgtggggtgatcctgctttcttcatggtacaagatcggatgatcagcaccctggcatgtgtggtggcagtgaagtcttggaacattgaccgcgacaacttgtgtgacaggggtgtgttatttatcaaagaaaatatgagcaggttggtagaagaggaacaggactggatgccatgcggctttgagattaacttcccagcactcctagaaaaggccaaggacctggacttggacatcccttatgatcaccctgttttggaagagatatatgccaagaggaatctgaagctcctcaagatacctctggatgtgctgcacgccataccaacgaccctactcttcagcgtcgagggaatggtagatttaccattggactgggaaaagctactcagattgcggtgtccggatggatccttccattcctcacctgctgccacagctgctgccctcagtcacaccggtgacaaggaatgccatgcgttcctggataggctcatccaaaagttcgaggggggagtgccatgtagccactcaatggacacttttgagcaattatgggtggtcgatcggctgatgcgtctggggatatcaaggcacttcacaagtgaaattcagcagtgcttagagtttatttacaggcgctggactcaaaagggactggctcacaacatgcactgcccaatcccggatattgatgacacggccatgggtttccgtctcctccgccagcatggctacgacgtcactccatctgtgtttaagcactttgagaaggatggcaagttcgtctgcttcccaatggagaccaaccacgcttcggttaccccaatgcacaacacttaccgtgcatctcagttcatgttccctggtgacgacgacgtcctggctagggccggccgctattgccgtgcattccttcaagagagacaatcctccaacaagctgtacgacaagtggatcatcaccaaggacctgccgggcgaggtcgggtacacgctaaacttcccatggaaatcaagtttgccgagaattgaaacaaggatgtatctggatcagtacggtggcaacaacgatgtttggattgccaaggtcctttacagaatgaatcttgtgagcaacgacctgtaccttaaaatggctaaggctgatttcacagaatatcaaagactctcccgaattgagtggaatggcctcagaaagtggtatttcaggaaccatctgcagaggtatggtgcgactccaaagagcgcgttgaaggcttacttcttagcttcagcaaatatcttcgaacccggccgagcagcagagcgtctagcatgggctcgcatggcggtgcttgctgaggcggttacaactcacttccgacacattgggggtccatgctattcaacagagaatcttgaagagcttatcgaccttgtttcgtttgatgatgtttccggcggccttcgtgaagcgtggaagcagtggcttatggcatggactgcaaaggagagccatggatccgttgatggagatacagcactgttgttcgtccgcaccatcgagatctgctccggaaggattgtttcatccgagcagaaactgaacctttgggattactcccagctcgagcagctcacttcttccatctgccacaagcttgccacaataggtctttctcagaatgaggcaagtatggagaacacagaggacttacaccagcaagtggatttggagatgcaagaactatcttggcgtgttcatcagggttgccatggcatcaatagagagaccagacagacatttctcaacgtggtgaaaagcttctattactcggctcattgctcacctgaaacagttgatagccacattgcaaaggtcatatttcaggatgtcatttag

SEQ ID NO: 76 - protein, 757 aa, Triticum aestivum
MLTFTAALRHVPVLDQPTSEPWRRLSLHLHSQRRPCGLVLISKSPSYPEVDVGEWKVDEYRQRTDEPSETRQMIDDIRTALASLGDDETSMSVSAYDTALVALVKNLDGGDGPQFPSCIDWIVQNQLPDGSWGDPAFFMVQDRMISTLACVVAVKSWNIDRDNLCDRGVLFIKENMSRLVEEEQDWMPCGFEINFPALLEKAKDLDLDIPYDHPVLEEIYAKRNLKLLKIPLDVLHAIPTTLLFSVEGMVDLPLDWEKLLRLRCPDGSFHSSPAATAAALSHTGDKECHAFLDRLIQKFEGGVPCSHSMDTFEQLWVVDRLMRLGISRHFTSEIQQCLEFIYRRWTQKGLAHNMHCPIPDIDDTAMGFRLLRQHGYDVTPSVFKHFEKDGKFVCFPMETNHASVTPMHNTYRASQFMFPGDDDVLARAGRYCRAFLQERQSSNKLYDKWIITKDLPGEVGYTLNFPWKSSLPRIETRMYLDQYGGNNDVWIAKVLYRMNLVSNDLYLKMAKADFTEYQRLSRIEWNGLRKWYFRNHLQRYGATPKSALKAYFLASANIFEPGRAAERLAWARMAVLAEAVTTHFRHIGGPCYSTENLEELIDLVSFDDVSGGLREAWKQWLMAWTAKESHGSVDGDTALLFVRTIEICSGRIVSSEQKLNLWDYSQLEQLTSSICHKLATIGLSQNEASMENTEDLHQQVDLEMQELSWRVHQGCHGINRETRQTFLNVVKSFYYSAHCSPETVDSHIAKVIFQDVI

SEQ ID NO: 77 - DNA, 2394 bp, Triticum aestivum
atgcaggtgtttaacggtaacctctgcaccgcatcctatgtccgacaggcaaacgtgccatggagacaacaaagtctcctgatgctacaagctcgacaccgacgacgtgggggcgtggtgaatgtgcaaacctcgggcccagcacaggcgcaagatcgtccaagaaaccaaaagatagacccacaactagcaccagtggacgtacaaggtggaagtcgacacatggctcaccatgacccaagcgagcttgcgctcatgatcgacaccatcagagcagggatgagctccatgggtggaggcgagataaccgtttcgccctacgacaccgccttcgtcgcccttgtcggggatctagatggaggtgatggacctcagttcccctccagcattgactggatcgttcaaaaccagctgcccgatggttcgtggggtgagagctcgtttttcctgatccaagaccggattatgaacaccctagcatgtgttgtggccttgacgtcatggaaccttcacgttgacaagtgcgagaaaggcttgaagtttatcagagaaaatatgtggaggttggccgaacaagaagaagactggacgctaataggcttcgagattagcttcccctcgctcctatgcatggccagggacctgggtcttgacattccttatgatcaccctgccttggacgcaatatattcccagagaaaccaaaagctcagcaagattcctttggatatactgcacagtataccaacgactctacttcacagtgtcgagggaatggtggacttggactggcaaaggctgcttaagttgaagtgttcagatggttccttcagaacatcacctgcagcaacagctcgtgctttgaaggaaacaggcgacctaaaatgcctcaaatacatagatgaaatcgtcaaaaagtttgatgggggagcgccctgtgtctatcctgtggatttgtacgagcgtttatgggccgttgatcggttgacgcgtctgggcatatcgaggcacttcacaagtgaaatcaaggagtgcttagattttacttacaggcattggactcaggttgaagacgatggactgagccacgcagggtcgtgctcagcagcggatatcgatgataccgcgatgggtttccgtctcctccgtttaaacggctaccacgtcaatccatgcgcactgaagaaatttgaaaaggacggcgaattcttctgcttccctaggcagtcgagccaatctgtcacggccatttacaacacataccgcgccacccaggtcgcttttcccggcgagaaggacgacgtccttcggcgggccgagcagtttggccgcgcattcctccaagagaggcgagcctccaacaaactcaacgacaagtgggtcatccccaaggatttgccaggcgaggtagaatacgcactggacttcccctggaaagcaagcttgccacgagtcgaaacaaggttctatctggagcaatatgggggcggcgatgacgtgtggattgggaaggtcctctatagaatgcctctcgtcaacaatgacctgtacctagaggcggcgaaagctgatttcaccaacttccagagaatgtgccgacttgagtggcatggcctgaaaaggtggtatgagaggaataatctggaaatgtatggtgtgtccgcaaatagcgcactcagagcttacttcttagcggcagcaaacatctttgagccgacccgagcagcagagcgcctggcatgggctcgcacggcgatgctcgctgaggctgtctcctcctacttccaacgcaacggttgcgctcccgagttgagggaacggctcagtgctatcctcactcccggccacagccacaatctagcaaggggggcaatggattcagtagaaaatagcataccacatgttgttaatgagctgatcatggacctcagcaaatttgacaatgccgccgacactcttcgcgaagcttggaaggactggttcacgacatggactgcaaaggagagcagtggaccatgtgaatggagtacagcgttgctgttagttcgcacagtcgaggtctgctcaggaaggcatggctcgacccaacagcaactgaacatttcggagtatacccagctcgaggggctcacctcttccatatgccgcaaactttcatctagggttctttcacagggtggacaaaaaatggaaaacatagaggatatagaccgacaagtggatttggatatgcgagaactcactcaacatgttcttcagagttgcaacggtgtcagcggactgaccaggcagacttttatgcacgtggtgaagagcttcaactacgtcaccctttgcccacatgacacaattgattgccatatctccaaggtcttattcgaagatgtcatttag

SEQ ID NO: 78 - protein, 797 aa, Triticum aestivum
MQVFNGNLCTASYVRQANVPWRQQSLLMLQARHRRRGGVVNVQTSGPAQAQDRPRNQKIDPQLAPVDVQGGSRHMAHHDPSELALMIDTIRAGMSSMGGGEITVSPYDTAFVALVGDLDGGDGPQFPSSIDWIVQNQLPDGSWGESSFFLIQDRIMNTLACVVALTSWNLHVDKCEKGLKFIRENMWRLAEQEEDWTLIGFEISFPSLLCMARDLGLDIPYDHPALDAIYSQRNQKLSKIPLDILHSIPTTLLHSVEGMVDLDWQRLLKLKCSDGSFRTSPAATARALKETGDLKCLKYIDEIVKKFDGGAPCVYPVDLYERLWAVDRLTRLGISRHFTSEIKECLDFTYRHWTQVEDDGLSHAGSCSAADIDDTAMGFRLLRLNGYHVNPCALKKFEKDGEFFCFPRQSSQSVTAIYNTYRATQVAFPGEKDDVLRRAEQFGRAFLQERRASNKLNDKWVIPKDLPGEVEYALDFPWKASLPRVETRFYLEQYGGGDDVWIGKVLYRMPLVNNDLYLEAAKADFTNFQRMCRLEWHGLKRWYERNNLEMYGVSANSALRAYFLAAANIFEPTRAAERLAWARTAMLAEAVSSYFQRNGCAPELRERLSAILTPGHSHNLARGAMDSVENSIPHVVNELIMDLSKFDNAADTLREAWKDWFTTWTAKESSGPCEWSTALLLVRTVEVCSGRHGSTQQQLNISEYTQLEGLTSSICRKLSSRVLSQGGQKMENIEDIDRQVDLDMRELTQHVLQSCNGVSGLTRQTFMHVVKSFNYVTLCPHDTIDCHISKVLFEDVI

SEQ ID NO: 79 - DNA, 2424 bp, Populus trichocarpa
atggtttctttttcattaggtgtttggttgtatggggctaaagacaaaaaagataacattcatacaaggtgcagtgctatatccaagcctcgcactcaagaatatgcagatttgtttcaacaacaaaatggtctgccattgataaactggcctcacgatattgtggaggatgacgcagaagaagatgctgctaaggtctctgtagcaaaggaaataagcaagcgcgtcagaactattaaagcaatgctggatatgatggaggatggagagataagcatctcagcttatgacaccgcatgggttgctcttgtggaagatattaatgggagtggccttccccaattcccatctagccttcagtggattgccaacaatcagcttccagatggttcgtggggtgacgctggaatatttttggcgcatgataggttgattaatacgctagcttgcgtggtagcattgaaatcttggaacttgcatcaagataaatgcgaaaaagggatgttattttttagagacaacttatgcaagcttgaagatgaaaatgctgagcacatgcctattggatttgaagttgctttcccttcacttcttgcgatagccaaagaattagacatcgaagttccggatgattctactttccttcaagagatttatgccaggagaaatttaaagctgaaaaggatttccaaggacataatgcacaatgtgcccacgaccctactccatagcttggaaggaatgcgaggtctggactggaaacagcttataaaattgcagtgcctagatgggtcattcttattctctccatcctctactgccttcgcactcagtcaaactaaagataaaaactgcttggaatatttgaataaggcggtccaaagattcaaagggggagttcccaatgtctacccggttgacttatttgagcacatctgggttgtggatcgcctgcagcgtcttggagtctcaagatatttcgtctcagagatcaatgaatgtgtcgattatattcatagatattggactgaaaatggcatctgttgggcgagaaattctaatgtccatgatattgatgacacggccatgggattcaggatacttagattacatgggcaccaggtttctgccgatgtgttcaagcattttgagaaaggcggtgaatttttctgcttcgcagggcagtcaacaggtgctgttacgggaattttcaacctgtatagggcttctcaggttctgtttccgggagagaagatacttgaggatgccaaggaatattcattcgaattcctaagggaaaaacaagctgctaatgaacttctagataaatggattataacgaaggacttgcccggagaggtgggttttgcattggagattccatggtatgcgagcttgcctcgagtggagactagattcttcatagaacagtatggtggcgaggacgacgtgtggattggcaagaccctttacagaatgtcatatataaacaacagtgagtatctccagctggcaaaattagactacaacaactgccaagcattacatcgcattgaatgggaaaattttcaaaagtggtatgaagaatgtaatctaagagatttcgggataagcagaagaacccttatcttttcttactttttggcagcagccagtatctttgagccggaaaggtccaaagagcgacttgcatgggctaccactacagtcttgctcgacattgtcggctcttatttccctgagaatcataacaattctagcgagcagaggagagccttcatacatgaattcagttacggtattagcataaatggaagggaggaaaatgattatttatgtctgattctcgtgtgttgcaggaggtcgggtagaaagaagacaaggcaggagctcgttaagctgctgcttggaaccctaaatcagctctctttgggcgcattagtggttcatggtcgagacattagccacagtttacgccatgcttgggaaaagtggctcttgatctgggaattggaaggagatagacgccaaggggaagcagaactactagtgcaaacaataaatctcaccgccggctatttggtctccgaggagctcttggcccatcatcctcagtatgaacaactcgtcgacctgacaaacagaatatgctatcaacttgatcattacaagaaaaacaaggtacattacaatggaagctacagcactattaccagtaatactgacagaattacaaccccacaaatagaatcagacatgcaagaacttgtgcagttagtagtccaaaatccctcagatggaatagattctaatatcaagcaaacgttccttcaagtagccaagagtttttattattctgcaatctgtgatcctgggactatcaactatcacatagctaaagtgctctttgagagagtgccttga

SEQ ID NO: 80 - protein, 807 aa, Populus trichocarpa
MVSFSLGVWLYGAKDKKDNIHTRCSAISKPRTQEYADLFQQQNGLPLINWPHDIVEDDAEEDAAKVSVAKEISKRVRTIKAMLDMMEDGEISISAYDTAWVALVEDINGSGLPQFPSSLQWIANNQLPDGSWGDAGIFLAHDRLINTLACVVALKSWNLHQDKCEKGMLFFRDNLCKLEDENAEHMPIGFEVAFPSLLAIAKELDIEVPDDSTFLQEIYARRNLKLKRISKDIMHNVPTTLLHSLEGMRGLDWKQLIKLQCLDGSFLFSPSSTAFALSQTKDKNCLEYLNKAVQRFKGGVPNVYPVDLFEHIWVVDRLQRLGVSRYFVSEINECVDYIHRYWTENGICWARNSNVHDIDDTAMGFRILRLHGHQVSADVFKHFEKGGEFFCFAGQSTGAVTGIFNLYRASQVLFPGEKILEDAKEYSFEFLREKQAANELLDKWIITKDLPGEVGFALEIPWYASLPRVETRFFIEQYGGEDDVWIGKTLYRMSYINNSEYLQLAKLDYNNCQALHRIEWENFQKWYEECNLRDFGISRRTLIFSYFLAAASIFEPERSKERLAWATTTVLLDIVGSYFPENHNNSSEQRRAFIHEFSYGISINGREENDYLCLILVCCRRSGRKKTRQELVKLLLGTLNQLSLGALVVHGRDISHSLRHAWEKWLLIWELEGDRRQGEAELLVQTINLTAGYLVSEELLAHHPQYEQLVDLTNRICYQLDHYKKNKVHYNGSYSTITSNTDRITTPQIESDMQELVQLVVQNPSDGIDSNIKQTFLQVAKSFYYSAICDPGTINYHIAKVLFERVP

SEQ ID NO: 81 - DNA, 2388 bp, Populus trichocarpa
atggcgtccttttcaataggtgtttggctgtatggggctagaggcaagcaagataactttcatgctcactcaagatgcagtgctatttccaaacctcgcactcaaggatatgcagacttgtttcatcaacaaaatggtctgccattgataaactggcctcacgatgttgtggaggatgacacagaagaagatgctgctaaggtttctgtggctaaggaaatagacgagcatgtcaaaactattaaagcaatgctggaaatgatggaggatggagagataagcatctcagcttatgacaccgcatgggttgctcttgtggaagacattaacgggagtggtcttcctcaattcccatctagccttcagtggattgcaaacaatcagcttccagatggttcatggggtgatgctgaaatatttttggcgcacgataggttgattaatacgctagcatgtgttgtcgcattgaaatcatggaatttacatcaagaaaaatgtgaaaaaggtatgttattttttagagacaacttatgcaagcttgaagatgaaaacgctgagcacatgcctattggatttgaagttgctttcccttcacttctcgagatagctaaaaaattagacatcgaagttccttatgattctcctgtcctgcaagagatttatgccagtagaaatttaaagctgacaaggatacccaaggacataatgcacaatgtgcccacaacactactccatagcttagaaggaatgccaggcctggaatggaaaaggcttctaaaattacagagccaagatgggtcattcttgttctccccatcctccactgccttcgcactcagtcaaactaaagataaaaactgcatggaatatttaaataaggcggtccaaagattcgaaggtggagttcccaatgtctacccggttgacttatttgagcacatatgggccgtggatcgtttgcagcgcttgggaatatcaagatatttcgagtcccagatcgacgaatgtgtcaattatattcatagatattggactgaagatggcatttgctgggcaagaaactctgaggtccatgatattgatgacacagccatgggattcagggtactaagattaaatgggcaccatgtttctgctgacgtgttcaagcattttgagaaagggggtgaatttttctgctttgcggggcagtcaacagcggcagtaacaggaatgttcaacctgtatagagcttctcagctgctgtttccgggagagaagatccttgagaaggccaaggaattttcattcaaattcctaagagaaaaacaagctgctaatgagcttctagataaatggcttataacgaaggacttacctggcgaggtgggatttgcattggaaattccatggcatgcgagcttgcctcgcgtggagtcgagattctacatagaacagtatggtggtgaagatgacgtatggattgggaagaccctttacagaatgccatatgtaaacaacaatgagtatctccagctggcaagattagactacaacaactgccaagcattacatcgcattgaatgggccaattttcaaaagtggtatgaagaatgcaatctaagagattttgggataagcagaaaaacccttctctactcttattttttggcagcagccagtgtatttgagccggaaaggtccaatgagcgacttgcatgggctaagactacgatcttgctcgagatgatccactcttatttccacgaggacgatgacaattctggtgctcagaggagaacttttgtacatgaattcagcaccggtattagcattaatggaaggaggtcgggtacaaagaagacaaggaaggaactcgttaagatgctgctcggaaccctaaatcagctctcttttggcgcattggaggttcatggtcgagacattagccacagtttacgtcatgcttgggaaaggtggctcataagctgggaattggaaggagatagacgccgaggggaagcagaactactggtgcaaacaatacaccttactgctggctataaggtctctgaggagctcttggtctatcatcctcaatatgaacagctcgccgacctgacaaacagaatatgctatcaacttggtcattaccagaagaacaaggtgcatgacaacggaagctacagcactattaccgggagcactgacagaatcacaaccccacaaatagaatctgacatgcaagaacttatgcagttagtgatccaaaagacctcggatggaatagatcctaaaatcaagcaaacattccttcaagtagccaagagtttttactacaccgcattctgtgatcctgggactatcaactaccatatagctaaagtgctttttgagacagtggcttaa

SEQ ID NO: 82 - protein, 795 aa, Populus trichocarpa
MASFSIGVWLYGARGKQDNFHAHSRCSAISKPRTQGYADLFHQQNGLPLINWPHDVVEDDTEEDAAKVSVAKEIDEHVKTIKAMLEMMEDGEISISAYDTAWVALVEDINGSGLPQFPSSLQWIANNQLPDGSWGDAEIFLAHDRLINTLACVVALKSWNLHQEKCEKGMLFFRDNLCKLEDENAEHMPIGFEVAFPSLLEIAKKLDIEVPYDSPVLQEIYASRNLKLTRIPKDIMHNVPTTLLHSLEGMPGLEWKRLLKLQSQDGSFLFSPSSTAFALSQTKDKNCMEYLNKAVQRFEGGVPNVYPVDLFEHIWAVDRLQRLGISRYFESQIDECVNYIHRYWTEDGICWARNSEVHDIDDTAMGFRVLRLNGHHVSADVFKHFEKGGEFFCFAGQSTAAVTGMFNLYRASQLLFPGEKILEKAKEFSFKFLREKQAANELLDKWLITKDLPGEVGFALEIPWHASLPRVESRFYIEQYGGEDDVWIGKTLYRMPYVNNNEYLQLARLDYNNCQALHRIEWANFQKWYEECNLRDFGISRKTLLYSYFLAAASVFEPERSNERLAWAKTTILLEMIHSYFHEDDDNSGAQRRTFVHEFSTGISINGRRSGTKKTRKELVKMLLGTLNQLSFGALEVHGRDISHSLRHAWERWLISWELEGDRRRGEAELLVQTIHLTAGYKVSEELLVYHPQYEQLADLTNRICYQLGHYQKNKVHDNGSYSTITGSTDRITTPQIESDMQELMQLVIQKTSDGIDPKIKQTFLQVAKSFYYTAFCDPGTINYHIAKVLFETVA

SEQ ID NO: 83 - DNA, 2613 bp, Salvia miltiorrhiza
ggacaagcaagcaacactaaattttctcatactttaatttctttccacatctccactcaaagggaaatttgaatggcctccttatcctctacaatcctcagccgctctccggcggcccgccgcagaattacgccggcgtcggctaagcttcaccggccggaatgtttcgccaccagtgcatggatgggcagcagcagtaaaaacctttctctcagctaccaacttaatcacaagaaaatatcagttgccacagtagatgcgccgcaggtgcatgaccacgacggcactaccgttcatcaaggccatgatgcggtgaagaatattgaggatcccattgaatacatcaggacgttgttgaggacgacgggggacgggagaataagcgtgtcgccgtacgacacggcgtgggtggcgatgatcaaggacgtggaggggcgggacggcccccagttcccctccagcctcgagtggatcgtgcagaatcaactcgaggatggatcgtggggcgatcagaagcttttctgcgtctacgatcgcctcgtcaataccatcgcgtgcgtggtagccttgagatcgtggaatgttcatgctcacaaggtcaaaagaggagtgacgtacatcaaggaaaatgtggataaacttatggagggaaatgaggagcacatgacttgtgggttcgaagtggtgtttccggcgcttctacaaaaagcgaaaagcttaggcatcgaagatcttccttacgattctccggcggtgcaggaggtttatcatgtcagggaacaaaagttgaaaaggattccactggagattatgcacaaaataccgacatcattattatttagtttggaagggctcgaaaatttggattgggacaaacttttgaaactgcagtcagccgacggttccttcctcacctctccctcctccaccgccttcgcgttcatgcaaaccaaggatgaaaaatgctaccaattcatcaagaacacgatagacactttcaacggaggagcgccacacacttatcccgtcgacgtgtttggaaggctctgggcgatcgaccggctgcagcgcctcggaatttcccgcttttttgagccggagattgctgattgcttaagccacatccacaaattttggacggataagggagttttcagtgggagagaatcggagttttgcgacattgacgatacatccatgggaatgaggcttatgaggatgcatggatatgatgttgatccaaatgtgctgaggaatttcaagcagaaagatggtaaattctcttgctacggcgggcagatgatcgagtcgccttctccgatatacaatctttacagagcttctcagctccgatttcccggcgaggaaatcctcgaagatgcgaagagattcgcctacgatttcttgaaagaaaaactagccaacaatcagattctggataaatgggttatttctaagcacttgcctgatgagatcaagctcgggctagagatgccgtggctcgccaccctaccccgcgtcgaggcgaagtactacatccagtactacgccggctccggcgacgtgtggatcggaaagacgctgtacaggatgccggagatcagcaacgacacgtaccacgacctagccaagacggatttcaagagatgccaagcgaagcatcagttcgagtggctctacatgcaagaatggtacgagagctgcggcatcgaggaattcgggataagcagaaaggaccttctgctttcctatttcttggcgaccgcgagcatcttcgagctcgagaggaccaacgagcgaatcgcgtgggccaaatcgcagatcatcgctaagatgatcacttctttcttcaacaaggaaactacgtcggaggaggacaagcgagctcttttgaacgagctcggaaacattaatggcctcaacgacacaaacggcgcagggagagaaggtggggccggtagcattgcgctagcgaccctcactcagttcctcgagggattcgacagatacaccagacaccagctgaaaaatgcttggagcgtatggctgacgcagctgcaacatggcgaagcagacgacgcggagctcctaaccaacacgttgaacatctgcgccggccacatcgccttcagggaagaaatactggcgcacaacgagtacaaagctctctccaacctaaccagcaaaatctgtcgacagctttctttcattcaaagcgaaaaggagatgggagtagagggcgagatcgcagcgaaatcgagcataaaaaacaaggaactcgaagaagacatgcaaatgttggtgaagttggtgcttgagaaatatgggggcatagatagaaatataaagaaagcgtttttagcagttgcgaagacttattattacagagcgtatcatgccgccgacaccatagacacacacatgtttaaagtgcttttcgagccagtcgcgtgaatattttgtttaaataagtatatagttgtttgtgtcgccacgggaaaagaaatgtaacataatcttttattattttgtataaataaaaacagttcagcagaaataaaataaatttttagattttctccaaaaaaaaaaaaaaaaaaaaaaaaaaaaaaa

SEQ ID NO: 84 - protein, 793 aa, Salvia miltiorrhiza
MASLSSTILSRSPAARRRITPASAKLHRPECFATSAWMGSSSKNLSLSYQLNHKKISVATVDAPQVHDHDGTTVHQGHDAVKNIEDPIEYIRTLLRTTGDGRISVSPYDTAWVAMIKDVEGRDGPQFPSSLEWIVQNQLEDGSWGDQKLFCVYDRLVNTIACVVALRSWNVHAHKVKRGVTYIKENVDKLMEGNEEHMTCGFEVVFPALLQKAKSLGIEDLPYDSPAVQEVYHVREQKLKRIPLEIMHKIPTSLLFSLEGLENLDWDKLLKLQSADGSFLTSPSSTAFAFMQTKDEKCYQFIKNTIDTFNGGAPHTYPVDVFGRLWAIDRLQRLGISRFFEPEIADCLSHIHKFWTDKGVFSGRESEFCDIDDTSMGMRLMRMHGYDVDPNVLRNFKQKDGKFSCYGGQMIESPSPIYNLYRASQLRFPGEEILEDAKRFAYDFLKEKLANNQILDKWVISKHLPDEIKLGLEMPWLATLPRVEAKYYIQYYAGSGDVWIGKTLYRMPEISNDTYHDLAKTDFKRCQAKHQFEWLYMQEWYESCGIEEFGISRKDLLLSYFLATASIFELERTNERIAWAKSQIIAKMITSFFNKETTSEEDKRALLNELGNINGLNDTNGAGREGGAGSIALATLTQFLEGFDRYTRHQLKNAWSVWLTQLQHGEADDAELLTNTLNICAGHIAFREEILAHNEYKALSNLTSKICRQLSFIQSEKEMGVEGEIAAKSSIKNKELEEDMQMLVKLVLEKYGGIDRNIKKAFLAVAKTYYYRAYHAADTIDTHMFKVLFEPVA

SEQ ID NO: 85 - DNA, 348 bp, Nicotiana sylvestris
ccaacaactttgcttcatagcttgaaagggatgtcagacttggactggaaatcacttctgaaactgcaatctcaagacgggtctttcttgttttctccgtcctccaccgcttttgctctcatgcaaaccaaagatcaaaattgctacaattacttgaatcaaatggtcaagaagttcaatgggggagttccagacgtgtatccagtggatttgtttgaacatatttgggtggttgataggctggaacgcctaggaatatctcggtattttcagcaagaggtcaaagactgtatgagctatgttcatagatattggaccgaaaaggggatatgttgggcaagaaatcac

SEQ ID NO: 86 - protein, 116 aa, Nicotiana sylvestris
PTTLLHSLKGMSDLDWKSLLKLQSQDGSFLFSPSSTAFALMQTKDQNCYNYLNQMVKKFNGGVPDVYPVDLFEHIWVVDRLERLGISRYFQQEVKDCMSYVHRYWTEKGICWARNH

SEQ ID NO: 87 - DNA, 2732 bp, Oryza sativa Japonica
cggtgatcgatcttgcatcttgcgagcacacgggattccagatcgatcgagctatagctagctagctaattagttaccacgtacgaacgagtactttacaactcgatcagttcatcaaattaactcgatcagtggttaagtttcgcacgacacacgcgcgcggatcggaagccatcatgcagatgcaggtgctcaccgctgcttcttcgctccctcgcgcgaccttgctccggccggcggctgccgagccatggcgccaatctttcctgcagctgcaggctcgtccaatccagcgaccaggtatcatgctacactgcaaggcccagctacaggggcaggaaacgcgcgagcgtcgtcagctcgacgacgatgaacacgctagaccaccacaggacggcgacgacgacgtcgcagcaagcaccagcgagctaccctacatgatcgagtccatcaaatccaagctgagggcggccaggaacagcctcggcgagaccaccgtctccgcctacgacacggcgtggatcgcgctcgtcaaccgcctcgacggcggcggcgagaggagcccccagttcccggaggccatcgactggatcgcccggaaccagctgcccgacggctcgtggggcgacgccggcatgttcatcgtccaggaccggctcatcaacacgctgggctgcgtcgtggcgctcgcgacgtggggcgtccacgaggagcagcgcgcgaggggcctcgcctacatccaggacaacctctggaggctcggcgaggacgacgaggagtggatgatggtcgggttcgagatcaccttccccgttctcctcgagaaggccaagaacctgggcctggacatcaactatgatgaccctgccttgcaggacatatatgccaagagacaattaaagctcgcaaagattcctagagaagcactgcatgctaggccgaccaccttgctccatagcttagagggaatggaaaacttggactgggaaaggttgctacagttcaagtgtccagctggctccttacattcctcacctgctgcgtcagcttacgctctcagcgaaacaggtgacaaggagttgctcgaatacctggaaacagccatcaacaattttgacggtggagcaccatgcacctaccctgtcgacaactttgaccgcttatggtcggtcgatcggttgaggcggctaggaatatcgaggtacttcacgagtgagattgaagaatacttggagtacgcctacaggcacctgagtccagatggcatgagctacggcgggctctgtccggtcaaggacatcgacgacacggccatggctttccgtctcctccgtctgcatggctacaatgtctcatcatcggtgttcaatcacttcgagaaggacggggagtacttctgcttcgcggggcagtcgagccagtcgctgacggcgatgtacaactcctaccgcgcctcgcagatcgtcttccccggcgacgacgacggcctggagcagctcagggcctactgccgcgccttcctcgaggagcggcgagccaccggcaacctcatggacaagtgggtcatcgccaatggcttgccacagcgaggtcgagtacgcgctggatttcccatggaaggcaagcttgccgcgagtcgagacgagggtgtatctggagcagtacggcgctacgaggacgcgtggatcggcaagggactctacaggatgaccctagtcaacaacgacctgtaccttgaggcggcaaaggctgacttcaccaacttccagaggctctcccggctcgagtggctcagcctgaaaaggtggtacatcaggaacaatctgcaagcgcacggcgtgaccgaacagagcgtgctgagagcctacttcttagccgcggcgaacatcttcgagcccaaccgggcggtcggaacgctgggatgggctcgcacggcgatcctcgccgaggccatcgcgtcacacctccgacagtacagtgccaacgacgccgccgacggcatgacagagaggctcatcagtggactcgccagccacgactgggactggagggaatcaaaggattcagcagcgaggagcttactgtacgcacttgatgagctcatcgacctccatgcgttcggcaatgcttctaacagcctacgtgaagcgtggaagcagtggctcatgtcatggacaaacgagagccaaggatcaactggtggggataccgcattgctgctagttcgcacaatcgagatctgctcaggacggcacggttcagccgagcagagcctgaagaacagtgcagactacgccaggcttgagcagatcgcctcttccatgtgcagcaaacttgccaccaaaattcttgctcagaatggaggaagcatggacaacgttgagggtatagaccaggaagtggatgttgagatgaaagagctgatccagcgtgtctacgggagcagcagcaacgatgtcagcagcgtgacgaggcagacatttctcgacgtggtgaagagcttttgctacgtcgctcattgctcgcccgaaacaatcgatgggcacatctccaaggttttgttcgaggatgtcaattaggaaaatggttgactactagaaaggcaataaaaacaagagttgtgtctaccagcatggctcgtaaagtgatgactgcgaaaattttctcaaagtgagatgaatttagtcgatatttgtttcacttgatggtacaaaaaaaaaaaaaaaaaaaaa

SEQ ID NO: 88 - protein, 800 aa, Oryza sativa Japonica
MQMQVLTAASSLPRATLLRPAAAEPWRQSFLQLQARPIQRPGIMLHCKAQLQGQETRERRQLDDDEHARPPQDGDDDVAASTSELPYMIESIKSKLRAARNSLGETTVSAYDTAWIALVNRLDGGGERSPQFPEAIDWIARNQLPDGSWGDAGMFIVQDRLINTLGCVVALATWGVHEEQRARGLAYIQDNLWRLGEDDEEWMMVGFEITFPVLLEKAKNLGLDINYDDPALQDIYAKRQLKLAKIPREALHARPTTLLHSLEGMENLDWERLLQFKCPAGSLHSSPAASAYALSETGDKELLEYLETAINNFDGGAPCTYPVDNFDRLWSVDRLRRLGISRYFTSEIEEYLEYAYRHLSPDGMSYGGLCPVKDIDDTAMAFRLLRLHGYNVSSSVFNHFEKDGEYFCFAGQSSQSLTAMYNSYRASQIVFPGDDDGLEQLRAYCRAFLEERRATGNLMDKWVIANGLPQRGRVRAGFPMEGKLAASRDEGVSGAVRRYEDAWIGKGLYRMTLVNNDLYLEAAKADFTNFQRLSRLEWLSLKRWYIRNNLQAHGVTEQSVLRAYFLAAANIFEPNRAVGTLGWARTAILAEAIASHLRQYSANDAADGMTERLISGLASHDWDWRESKDSAARSLLYALDELIDLHAFGNASNSLREAWKQWLMSWTNESQGSTGGDTALLLVRTIEICSGRHGSAEQSLKNSADYARLEQIASSMCSKLATKILAQNGGSMDNVEGIDQEVDVEMKELIQRVYGSSSNDVSSVTRQTFLDVVKSFCYVAHCSPETIDGHISKVLFEDVN

SEQ ID NO: 89 - DNA, 2403 bp, Solanum lycopersicum
atgtcgatctcagcttcttttttaagatttagcctcactgctcactatcaaccttctccttcttcttctccaccaaatcaacctttcaaattccttaaaagcaacagagaacatgttgaattcaatcgaattttgcaatgtcatgctgtttctagacgtcgtacaaaagattacaaagaggtgcaaagtggttcgttgccggttatcaagtgggacgacatagcagaggaagtggacgaggaaacacacacacttgaggtgtacgatccatcctccaacgaggaccatatcgatgctattcgatcgatgctaggatcaatgggagacggagaaataagcgtctcggcctatgacacagcatgggttgccatggtgaaagatgtgaaggggactgaaactcctcagttcccttcaagccttgagtggattgcgaacaatcagttggctgatggttcatggggtgacaactccattttcttggtttatgatcgtgtcatcaacacattggcttgtgttattgccttgaagtcatggaacttgcatcctgacaagattctacttggaatgtcgtttatgagagagaatttgagcaggattggtgatgagaatgcagagcacatgcctataggcttcgaagtggcatttccttcactcattgagattgctaaaaagttaggcttagattttccttatgattctcccgtcttgcaagacatctatgccagtagacaactaaagcttacaaggataccaaaggacatcatgcacaaagtccccacaactttactccacagtttggaaggaatgacagatttggactggcaaaagttgcttcaatttcagtgcactgatggctcttttctcttctctccatcttccaccgcatatgcacttatgcaaactcaagatcataattgtctcaattatctcaaaaatgctgtccacaaattcaacggcggagttccaaatgtgtatccagtggacctatttgaacatatttggaccgttgatcggttgcaaaggcttggaatttctcggtattttgagctaaaaataaaaaagtgcattgattactttagcaaatattggacaaataaaggaatctgctgggctagaaattccccagttcaagacattgatgacacggctatggcttttagacttttgcgcttgcatggctacgctgtttctgctgacgtattcaaacattttgagagcaaaggcgaatttttctgcttcgtggggcaatcaaatcaagcagtgacaggaatgtataatctttatagggcatctcatgtaatgttctcaggagagaaaatacttgaaaatgcaaaaatatccacttctaattatctaagagaaaaacgagctcaaaatcaactgctagacaagtggatcattactaaagatttacctggagaggtgggatatgcattagatgtgccatggtatgctagcctaccccgcctagaaacaaggttctttttagaacattatggtggtgaagatgacgtgtggattggcaaaacattgtacaggatgccattggttaacaatagcctatacctagagctagcgaaatcggactataacaattgccaagctttgcaccagttcgagtggagaagaattcgcaagtggtactacgaatgcgggctaagagagtttggattaagtgaaaaaaggttgttggttacgtactatttaggcagtgctagtatatttgaggcacaaaggtcgaccgagcgaatggcttgggtcaaaaccgcagctcttatggactgtgtgaggtcttgttttggctccccacaagtatctgcagctgcatttctttgcgaattcgcacactactctagcaccgctctgaattcgaggtacaacacagaagataggctcgttggggtcattcttggaaccctaaatcatctctcactgagtgccttattaacacatggcagagacatccatcactacttgcgtcatgcttgggaaaattggctactgacggtaggagaaggagaaggagaaggagaaggaggtgctgaactcataattcgcaccttaaatttgtgcagtgttcattggatatcggaggagatattgttgtcccatccaacttaccaaaagctattggaaattaccaatagagtttctcaccgactccgtctctacaagggacacagtgaaaagcaggtaggaatgttgacttttagtgaagaaatagaaggtgacatgcaacagctagcagagctcgtgctatctcattcagatgcttccgaattggatgccaatatcaaagacacttttctcactgttgccaaaagtttttactactcagcttattgtgatgatcgaacaattaactttcacatagccaaagtgctatttgaaagagtagtttaa

SEQ ID NO: 90 - protein, 800 aa, Solanum lycopersicum
MSISASFLRFSLTAHYQPSPSSSPPNQPFKFLKSNREHVEFNRILQCHAVSRRRTKDYKEVQSGSLPVIKWDDIAEEVDEETHTLEVYDPSSNEDHIDAIRSMLGSMGDGEISVSAYDTAWVAMVKDVKGTETPQFPSSLEWIANNQLADGSWGDNSIFLVYDRVINTLACVIALKSWNLHPDKILLGMSFMRENLSRIGDENAEHMPIGFEVAFPSLIEIAKKLGLDFPYDSPVLQDIYASRQLKLTRIPKDIMHKVPTTLLHSLEGMTDLDWQKLLQFQCTDGSFLFSPSSTAYALMQTQDHNCLNYLKNAVHKFNGGVPNVYPVDLFEHIWTVDRLQRLGISRYFELKIKKCIDYFSKYWTNKGICWARNSPVQDIDDTAMAFRLLRLHGYAVSADVFKHFESKGEFFCFVGQSNQAVTGMYNLYRASHVMFSGEKILENAKISTSNYLREKRAQNQLLDKWIITKDLPGEVGYALDVPWYASLPRLETRFFLEHYGGEDDVWIGKTLYRMPLVNNSLYLELAKSDYNNCQALHQFEWRRIRKWYYECGLREFGLSEKRLLVTYYLGSASIFEAQRSTERMAWVKTAALMDCVRSCFGSPQVSAAAFLCEFAHYSSTALNSRYNTEDRLVGVILGTLNHLSLSALLTHGRDIHHYLRHAWENWLLTVGEGEGEGEGGAELIIRTLNLCSVHWISEEILLSHPTYQKLLEITNRVSHRLRLYKGHSEKQVGMLTFSEEIEGDMQQLAELVLSHSDASELDANIKDTFLTVAKSFYYSAYCDDRTINFHIAKVLFERVV

SEQ ID NO: 91 - DNA, 2478 bp, Scoparia dulcis
atggcattggccactctcctccgatcaccaccctcacccggcgttctcgcggcggccttacatgttccttcctccagcacttttggccgtaccaccacctgtgtttttccctcttattcatggaaaacacctgtcccttccagtaacacttcgccgtgtaatgcaatttccagacctcgtaccgaagaacgaatagacctgatccggaatggatttcctacgataaattactggcatgagattgtggaggatgacacacaactagaaataactcatagggagacagcaatatcatcaaacaagatatgggagatggtgaagacgatccgagggatgctgcggtcgatggaggacggagagataaccgtatcgccgtacgacaccgcatgggtggcgttggtggaggatatcggcggcagtggcacgccgcagttcccgtcgagtctggagtggatttcgaacaatcagctcccggacggctcgtggggcgacggcgccaccttttcggcccacgatcgtataatcaacacattagcttgtgttattgcattgagaacttggaacatgcactctgacaaaagtgatagagggatcgcgttcattagagagaacatgtacaagctagaggatgaaaatgaggagcacatgccaatcgggttcgaagtggcattgccatcactgattgaaatagcaaaaaagatagacattgatatccctgatgattccccagttttgaaagagatttacgcaaaaagagatttaaagctgaaaaggataccaagggacataatgcacaaagtgcccacaacactactccacagcttggaagggatggcgggcctggattgggaaaagctaataaatctgcagtcagccgatggatcattccttttctcgccatcctccactgcctttgccctccagcaaaccaaagaccataactgcctccattatctggccagacacctccaaaagttcaatggcggagtgccaaacgtatatccggtggacttgttcgagcacctctgggcagttgataggttggaaaggcttggactttcccgatattttcaaccagaaattgaagaatgcatcgactatgttcacggacactggacaagtaaaggtatctgctgggcaagaaattctgaagttaaagacatcgacgacactgcaatgggattcaggcttctcagactgcacggctacgaagtttccgcggatgttttcaagcatttcgaaaatggaggggagtttttctgcttcgtgggacagtcgacacaggccgtgaccggaatgtacaacctgttcagggcttctcaggtgatgttccctggagaagacatactctccaacgccaaaagcttctcgtcgaaatttctgcaagaaaaacgagctaataatgagctgttggataagtggattatcaccaaagatcttccaggcgaggtgggatatgcactagatgtgccctggtacgcaagcctgccccgagttgaaacaagactctacttggaacaatacggcggccaagacgatgtctggatcgggaaaactctttacaggatgccatatgtcaataataacacctatctcgagctggcaaaattagactacaacaattgccaggcctcacatcagcaagagtggaagagcattcaaaaatggtatagtcgttgcaattttggggagtatggaatgagtgaaagaagcctactcctagcttattatattgccgccgcatccatatttgagccagagagagccatagagcgtctggcttgggctaaaaccgcgattttaatggagacaatagagacgcattttgaaggacaactcttctcaagagagcggaaacgtgctttcgtcaatgaattcaaacttgatggcagccgcatgcatgcaaacggagcaaggtataacaaaacaaggaacagtctaacggagaccctggttaggactctaaaccacctctcattggacacgttgttggcacacggcagggacatccatcagcaattgtatcatgggtgggaaaagtggctaagaacatgcgaagagagagatgtgcacagcgggcaaggggatgcagagctgcttgtacgcacgttaaatttatgtggaggcggcggccgttgggtgtcggaggagctattgttatcccatcccaagtatcaacatctcttggaagtcacaaacagagtctgccaccaacttcgtctatttcaacgacgacaggcctgtgatgtaaatggcggttgcatgacagacgtgggaggcatcctaagcgcccagatagaatcaaacatgcaagaactagcgaagttggtgctcaccaaatcatcctcaggagacttagattctgacacaaagcaaaacttccttactgtcgccaggagtttctactatgcggtctattgtaatcctggaagtatcaactttcacatagccaaagttctcttcgaaagagtgctctaa

SEQ ID NO: 92 - protein, 825 aa, Scoparia dulcis
MALATLLRSPPSPGVLAAALHVPSSSTFGRTTTCVFPSYSWKTPVPSSNTSPCNAISRPRTEERIDLIRNGFPTINYWHEIVEDDTQLEITHRETAISSNKIWEMVKTIRGMLRSMEDGEITVSPYDTAWVALVEDIGGSGTPQFPSSLEWISNNQLPDGSWGDGATFSAHDRIINTLACVIALRTWNMHSDKSDRGIAFIRENMYKLEDENEEHMPIGFEVALPSLIEIAKKIDIDIPDDSPVLKEIYAKRDLKLKRIPRDIMHKVPTTLLHSLEGMAGLDWEKLINLQSADGSFLFSPSSTAFALQQTKDHNCLHYLARHLQKFNGGVPNVYPVDLFEHLWAVDRLERLGLSRYFQPEIEECIDYVHGHWTSKGICWARNSEVKDIDDTAMGFRLLRLHGYEVSADVFKHFENGGEFFCFVGQSTQAVTGMYNLFRASQVMFPGEDILSNAKSFSSKFLQEKRANNELLDKWIITKDLPGEVGYALDVPWYASLPRVETRLYLEQYGGQDDVWIGKTLYRMPYVNNNTYLELAKLDYNNCQASHQQEWKSIQKWYSRCNFGEYGMSERSLLLAYYIAAASIFEPERAIERLAWAKTAILMETIETHFEGQLFSRERKRAFVNEFKLDGSRMHANGARYNKTRNSLTETLVRTLNHLSLDTLLAHGRDIHQQLYHGWEKWLRTCEERDVHSGQGDAELLVRTLNLCGGGGRWVSEELLLSHPKYQHLLEVTNRVCHQLRLFQRRQACDVNGGCMTDVGGILSAQIESNMQELAKLVLTKSSSGDLDSDTKQNFLTVARSFYYAVYCNPGSINFHIAKVLFERVL

SEQ ID NO: 93 - DNA, 3460 bp, Zea mays
gacctgaccaccaccccccggccggccctttcattctttccttactttcttcctcctgctgctcttgccgtttcagtgattattagctgctgtacgtgcgtgcgtacattgttctctctgctgacacccatacacgctgtagcttctacacataccagttcgatcgcaagctatagcatggggcttcaatcatcgcccatgctgctgccagcgccgacggcaacggcggccggcagcgggtcacagtggcgcacggctgtggcgggtaatggtaactcgtttatcttcttctacacgtaatctctattatatacctagattttctccacaggcagatcagattctttacacagctgtattctcaaaaaaaactcatagaaaaaaaagaaaaaactaaaccaaaggagcgacctcaacctgtaccagtgcccctgctagcagtagcttcgttctgtcccttttttttcatttggatcctctacataaatgctgggtggtggtgtcctttcacgcacacatccgcagatagcgccccagcagcatttatgtggggacgacggctctgaaatgaattactagtcagtttcatgcgtttcagtgcgagtattatagtagtagatctcttctccgatatatccggccaaaggaagaagagaagagaaaccacacatctcattctcaactagtagtagaaaagtaaaaacgtactacaagcgcaagcgcaaagatggttctttcatcgtcttgcacaacagttcctcacctttcttcccttgcggtcgttcaactaggcccatggagttcccgcatcaagaagaagacggatacagtcgccgtccccgcggccgccggccggtggaggagggcactggcgcgggcccagcacaccagcgaatccgccgccgtcgccaaaggttcgtccctaacgcccatcgtgagaaccgatgccgaaagccgccgcacgagatggcctacggacgacgacgacgctgagccgctggtcgacgagatcagggcaatgctgacgtcgatgagcgacggggacatcagcgtgtcggcgtacgacaccgcctgggtgggtcttgtgcccaggctggacggcggcgagggcccgcagttcccggccgccgtgcggtggatccggaacaaccagctccccgacggctcgtggggcgacgcggccctgttctccgcgtacgaccgcctgatcaacacgctggcgtgcgtcgtcacgctcaccaggtggtcgctggagcccgagatgcgcggcagagggctctctttcctcggccggaacatgtggaagctagcgacggaggacgaggagtccatgccgatagggttcgagctcgcgttcccttctctcatcgaactagccaagagtctgggcgtccacgacttcccgtacgaccaccaggctctgcagggaatatactcgagcagggagatcaagatgaagaggattcctaaggaagtgatgcacacggttcccacatccattctccacagcctggaagggatgcccgggctagactgggcgaagctgctgaaactgcagtcgagcgacgggtccttcctcttctctcccgcggccaccgcgtacgctctcatgaacaccggcgacgacaggtgcttcagctacatcgacaggacagtcaagaaattcaacggaggagtgcccaacgtctaccccgtggaccttttcgagcacatatgggctgtcgatcgcctggagcgtctcgggatctcccgctacttccagaaagagattgagcagtgcatggactacgtgaacaggcactggactgaggacgggatctgctgggcgaggaactccgacgtgaaggaggtggacgacacggccatggctttccgcctgctacggctgcacggatacagcgtctcgccagatgtgttcaagaacttcgagaaggacggggagttcttcgccttcgtggggcagtcgaaccaggcggtgacggggatgtacaacctcaacagggcctcccagataagcttcccgggggaggacgtcctgcaccgtgcaggggctttctcgtacgagtttctcaggcggaaagaggccgagggagcgctccgtgacaaatggatcatatctaaggacctgcctggggaggtagtgtacaccctggacttcccttggtatgggaacctgccgcgcgtggaggcgagagactatctggaacagtacggcggcggcgacgatgtctggatcgggaagacgctctacaggatgcctcttgtgaataacgatgtgtatcttgagctggctaggatggacttcaaccattgccaagccctacatcagcttgagtggcaaggcctgaaaaggtggtacactgagaaccggctcatggatttcggagtggcgcaagaggatgctctgcgagcgtatttcctggccgccgcttccgtctacgagccgtgccgagccgcggagcggcttgcgtgggccagagcggcgatacttgccaacgccgtctctacccatctccgtaacagcccctcattcagagaacgcttggaacactccttgcgttgccgccccagtgaagaaacggatggatcatggttcaactcatcaagtggaagtgacgctgttcttgtgaaggcagttctgcggcttaccgactcgttagcgcgagaagcgcagccgattcatggcggtgatccggaggacatcatccacaagctactgagatcagcttgggctgaatgggtcagggagaaggcagatgcagcagacagcgtgtgtaatggatccagtgctgtggaacaagaagggtcgcgcatggttcatgacaagcaaacgtgtctgcttttagctcgaatgatcgagatcagcgctgggcgagctgcaggtgaggctgcgagcgaagatggtgaccgtcggattatccagctcactgggtctatatgtgacagtctcaagcagaagatgctagtatctcaggaccccgagaagaacgaagagatgatgagccatgtcgatgacgaattgaagctgcgtatacgagagttcgttcagtatcttctgagactcggtgagaagaaaaccggcagcagcgagacaaggcagacctttctgagcatcgtgaaaagctgttactacgctgctcactgcccgccgcatgtggtagacaggcatatttccagagttatttttgaacctgtttccgccgcaaaataatggtaatggtagatgtgaatgtgatatggagataagagagagagaaaatgttgatagtggaaattggcgttgatgtcgcctccacattctttacgcaaaagtagcgtctgttttggataaaaaaaatccagtttctgtaaattatagaataaatcaatcgctgtgtcccaaactctaaaatgttattctgtgaagtatggaataaatcggtcactatacctatcttgtggatgcaaaaaaaaaaaaaaa

SEQ ID NO: 94 - protein, 827 aa, Zea mays
MVLSSSCTTVPHLSSLAVVQLGPWSSRIKKKTDTVAVPAAAGRWRRALARAQHTSESAAVAKGSSLTPIVRTDAESRRTRWPTDDDDAEPLVDEIRAMLTSMSDGDISVSAYDTAWVGLVPRLDGGEGPQFPAAVRWIRNNQLPDGSWGDAALFSAYDRLINTLACVVTLTRWSLEPEMRGRGLSFLGRNMWKLATEDEESMPIGFELAFPSLIELAKSLGVHDFPYDHQALQGIYSSREIKMKRIPKEVMHTVPTSILHSLEGMPGLDWAKLLKLQSSDGSFLFSPAATAYALMNTGDDRCFSYIDRTVKKFNGGVPNVYPVDLFEHIWAVDRLERLGISRYFQKEIEQCMDYVNRHWTEDGICWARNSDVKEVDDTAMAFRLLRLHGYSVSPDVFKNFEKDGEFFAFVGQSNQAVTGMYNLNRASQISFPGEDVLHRAGAFSYEFLRRKEAEGALRDKWIISKDLPGEVVYTLDFPWYGNLPRVEARDYLEQYGGGDDVWIGKTLYRMPLVNNDVYLELARMDFNHCQALHQLEWQGLKRWYTENRLMDFGVAQEDALRAYFLAAASVYEPCRAAERLAWARAAILANAVSTHLRNSPSFRERLEHSLRCRPSEETDGSWFNSSSGSDAVLVKAVLRLTDSLAREAQPIHGGDPEDIIHKLLRSAWAEWVREKADAADSVCNGSSAVEQEGSRMVHDKQTCLLLARMIEISAGRAAGEAASEDGDRRIIQLTGSICDSLKQKMLVSQDPEKNEEMMSHVDDELKLRIREFVQYLLRLGEKKTGSSETRQTFLSIVKSCYYAAHCPPHVVDRHISRVIFEPVSAAK

SEQ ID NO: 95 - DNA, 4577 bp, Zea mays
gacctgaccaccaccccccggccggccctttcattctttccttactttcttcctcctgctgctcttgccgtttcagtgattattagctgctgtacgtgcgtgcgtacattgttctctctgctgacacccatacacgctgtagcttctacacataccagttcgatcgcaagctatagcatggggcttcaatcatcgcccatgctgctgccagcgccgacggcaacggcggccggcagcgggtcacagtggcgcacggctgtggcgggtaatggtaactcgtttatcttcttctacacgtaatctctattatatacctagattttctccacaggcagatcagattctttacacagctgtattctcaaaaaaaactcatagaaaaaaaagaaaaaactaaaccaaaggagcgacctcaacctgtaccagtgcccctgctagcagtagcttcgttctgtcccttttttttcatttggatcctctacataaatgctgggtggtggtgtcctttcacgcacacatccgcagatagcgccccagcagcatttatgtggggacgacggctctgaaatgaattactagtcagtttcatgcgtttcagtgcgagtattatagtagtagatctcttctccgatatatccggccaaaggaagaagagaagagaaaccacacatctcattctcaactagtagtagaaaagtaaaaacgtactacaagcgcaagcgcaaagatggttctttcatcgtcttgcacaacagttcctcacctttcttcccttgcggtcgttcaactaggcccatggagttcccgcatcaagaagaagacggatacagtcgccgtccccgcggccgccggccggtggaggagggcactggcgcgggcccagcacaccagcgaatccgccgccgtcgccaaaggtacgggtgatcgctagctttgatagctccaaatctgagcagcaaattaaatagctaggtttgtaacgcacgcacgcatgcaggttcgtccctaacgcccatcgtgagaaccgatgccgaaagccgccgcacgagatggcctacggacgacgacgacgctgagccgctggtcgacgagatcagggcaatgctgacgtcgatgagcgacggggacatcagcgtgtcggcgtacgacaccgcctgggtgggtcttgtgcccaggctggacggcggcgagggcccgcagttcccggccgccgtgcggtggatccggaacaaccagctccccgacggctcgtggggcgacgcggccctgttctccgcgtacgaccgcctgatcaacacgctggcgtgcgtcgtcacgctcaccaggtggtcgctggagcccgagatgcgcggcagaggtacgtaattactgtgtgctggccgatcgagagaacacacgacggcagtgtacctcgacagaaaacgggcgttgctgaagactcaagtgtgtgtgtgtgtgtgttcacagggctctctttcctcggccggaacatgtggaagctagcgacggaggacgaggagtccatgccgatagggttcgagctcgcgttcccttctctcatcgaactagccaagagtctgggcgtccacgacttcccgtacgaccaccaggctctgcagggaatatactcgagcagggagatcaagatgaagaggattcctaaggaagtgatgcacacggttcccacatccattctccacagcctggaagggatgcccgggctagactgggcgaagctgctgaaactgcagtcgagcgacgggtccttcctcttctctcccgcggccaccgcgtacgctctcatgaacaccggcgacgacaggtgcttcagctacatcgacaggacagtcaagaaattcaacggaggaggtacgcaagcagtagcgtagatacatgggcatagcatgcatgcatgcaatgcagcgttgcccactgcatgcgccttccttccttccttctcgtctcttcaacggttcgtcttctctcgccgtttctcgcagtgcccaacgtctaccccgtggaccttttcgagcacatatgggctgtcgatcgcctggagcgtctcgggatctcccgctacttccagaaagagattgagcagtgcatggactacgtgaacaggcactggactgaggacgggatctgctgggcgaggaactccgacgtgaaggaggtggacgacacggccatggctttccgcctgctacggctgcacggatacagcgtctcgccaggtacgtaacaaacacaaaaaaaaaaaacgcgcagacaacagagatcgtcacgtcatacacacgcgtgtcctgaacatttttcatttggtctcccacccatcgtacgtaataataataaaaaaaaacgtgcttctgccctgcctgtgtacgtgtagatgtgttcaagaacttcgagaaggacggggagttcttcgccttcgtggggcagtcgaaccaggcggtgacggggatgtacaacctcaacagggcctcccagataagcttcccgggggaggacgtcctgcaccgtgcaggggctttctcgtacgagtttctcaggcggaaagaggccgagggagcgctccgtgacaaatggatcatatctaaggacctgcctggggaggtagtgtacaccctggacttcccttggtatgggaacctgccgcgcgtggaggcgagagactatctggaacagtacggcggcggcgacgatgtctggatcgggaagacgctctacaggtagatagatctttttagctattaattggtttcagatcgaccagataaaatttgcattattggttcttttgatgcatgtaattgaaagccaataaataacctcagtatgcgtgatggctgacttttgcattggcaggatgcctcttgtgaataacgatgtgtatcttgagctggctaggatggacttcaaccattgccaagccctacatcagcttgagtggcaaggcctgaaaaggtatgtatgttactatatatatacagcccggttgttgagttttttttttattttatttttttcgcgattaccatttcttctcgatgcaaaataaatctgcacagatcatcatatatatccttgatgatatataagggcttctcgtatatatatcttatcacctatatatacataggtggtacactgagaaccggctcatggatttcggagtggcgcaagaggatgctctgcgagcgtatttcctggccgccgcttccgtctacgagccgtgccgagccgcggagcggcttgcgtgggccagagcggcgatacttgccaacgccgtctctacccatctccgtaacagcccctcattcagagaacgcttggaacactccttgcgttgccgccccagtgaagaaacggatggatcatggtaataagctgatcgatgggaaattaaaaatttaagttttttttttcttttttgttgccattatctgagaccaatgcaatgtggtgcatatatatccaggttcaactcatcaagtggaagtgacgctgttcttgtgaaggcagttctgcggcttaccgactcgttagcgcgagaagcgcagccgattcatggcggtgatccggaggacatcatccacaagctactgagatcagctgtaagttaaacgtaacgttcagaagaagatttttttttttttttgcagttaacaagtactacgacatctatcgtttttgttcagcatgcacagtcatcctagctactaataccattattcttctgtgaacttgtgtagtgggctgaatgggtcagggagaaggcagatgcagcagacagcgtgtgtaatggatccagtgctgtggaacaagaagggtcgcgcatggttcatgacaagcaaacgtgtctgcttttagctcgaatgatcgagatcagcgctgggcgagctgcaggtgaggctgcgagcgaagatggtgaccgtcggattatccagctcactgggtctatatgtgacagtctcaagcagaagatgctagtatctcaggtatagcacatatatactacagaaagtttgtgcgtagttattatttcccttttttcatgtgacgaacatgatgacctgatgatgcatgtatatggcttcatataggaccccgagaagaacgaagagatgatgagccatgtcgatgacgaattgaagctgcgtatacgagagttcgttcagtatcttctgagactcggtgagaagaaaaccggcagcagcgagacaaggcagacctttctgagcatcgtgaaaagctgttactacgctgctcactgcccgccgcatgtggtagacaggcatatttccagagttatttttgaacctgtttccgccgcaaaataatggtaatggtagatgtgaatgtgatatggagataagagagagagaaaatgttgatagtggaaattggcgttgatgtcgcctccacattctttacgcaaaagtagcgtctgttttggataaaaaaaatccagtttctgtaaattatagaataaatcaatcgctgtgtcccaaactctaaaatgttattctgtgaagtatggaataaatcggtcactatacctatcttgtggatgc

SEQ ID NO: 96 - protein, 5404 aa, Zea mays
GACCTGACCACCACCCCCCGGCCGGCCCTTTCATTCTTTCCTTACTTTCTTCCTCCTGCTGCTCTTGCCGTTTCAGTGATTATTAGCTGCTGTACGTGCGTGCGTACATTGTTCTCTCTGCTGACACCCATACACGCTGTAGCTTCTACACATACCAGTTCGATCGCAAGCTATAGCATGGGGCTTCAATCATCGCCCATGCTGCTGCCAGCGCCGACGGCAACGGCGGCCGGCAGCGGGTCACAGTGGCGCACGGCTGTGGCGGGTAATGGTAACTCGTTTATCTTCTTCTACACGTAATCTCTATTATATACCTAGATTTTCTCCACAGGCAGATCAGATTCTTTACACAGCTGTATTCTCAAAAAAAACTCATAGAAAAAAAAGAAAAAACTAAACCAAAGGAGCGACCTCAACCTGTACCAGTGCCCCTGCTAGCAGTAGCTTCGTTCTGTCCCTTTTTTTTCATTTGGATCCTCTACATAAATGCTGGGTGGTGGTGTCCTTTCACGCACACATCCGCAGATAGCGCCCCAGCAGCATTTATGTGGGGACGACGGCTCTGAAATGAATTACTAGTCAGTTTCATGCGTTTCAGTGCGAGTATTATAGTAGTAGATCTCTTCTCCGATATATCCGGCCAAAGGAAGAAGAGAAGAGAAACCACACATCTCATTCTCAACTAGTAGTAGAAAAGTAAAAACGTACTACAAGCGCAAGCGCAAAGATGGTTCTTTCATCGTCTTGCACAACAGTTCCTCACCTTTCTTCCCTTGCGGTCGTTCAACTAGGCCCATGGAGTTCCCGCATCAAGAAGAAGACGGATACAGTCGCCGTCCCCGCGGCCGCCGGCCGGTGGAGGAGGGCACTGGCGCGGGCCCAGCACACCAGCGAATCCGCCGCCGTCGCCAAAGGTACGGGTGATCGCTAGCTTTGATAGCTCCAAATCTGAGCAGCAAATTAAATAGCTAGGTTTGTAACGCACGCACGCATGCAGGTTCGTCCCTAACGCCCATCGTGAGAACCGATGCCGAAAGCCGCCGCACGAGATGGCCTACGGACGACGACGACGCTGAGCCGCTGGTCGACGAGATCAGGGCAATGCTGACGTCGATGAGCGACGGGGACATCAGCGTGTCGGCGTACGACACCGCCTGGGTGGGTCTTGTGCCCAGGCTGGACGGCGGCGAGGGCCCGCAGTTCCCGGCCGCCGTGCGGTGGATCCGGAACAACCAGCTCCCCGACGGCTCGTGGGGCGACGCGGCCCTGTTCTCCGCGTACGACCGCCTGATCAACACGCTGGCGTGCGTCGTCACGCTCACCAGGTGGTCGCTGGAGCCCGAGATGCGCGGCAGAGGTACGTAATTACTGTGTGCTGGCCGATCGAGAGAACACACGACGGCAGTGTACCTCGACAGAAAACGGGCGTTGCTGAAGACTCAAGTGTGTGTGTGTGTGTGTTCACAGGGCTCTCTTTCCTCGGCCGGAACATGTGGAAGCTAGCGACGGAGGACGAGGAGTCCATGCCGATAGGGTTCGAGCTCGCGTTCCCTTCTCTCATCGAACTAGCCAAGAGTCTGGGCGTCCACGACTTCCCGTACGACCACCAGGCTCTGCAGGGAATATACTCGAGCAGGGAGATCAAGATGAAGAGGATTCCTAAGGAAGTGATGCACACGGTTCCCACATCCATTCTCCACAGCCTGGAAGGGATGCCCGGGCTAGACTGGGCGAAGCTGCTGAAACTGCAGTCGAGCGACGGGTCCTTCCTCTTCTCTCCCGCGGCCACCGCGTACGCTCTCATGAACACCGGCGACGACAGGTGCTTCAGCTACATCGACAGGACAGTCAAGAAATTCAACGGAGGAGGTACGCAAGCAGTAGCGTAGATACATGGGCATAGCATGCATGCATGCAATGCAGCGTTGCCCACTGCATGCGCCTTCCTTCCTTCCTTCTCGTCTCTTCAACGGTTCGTCTTCTCTCGCCGTTTCTCGCAGTGCCCAACGTCTACCCCGTGGACCTTTTCGAGCACATATGGGCTGTCGATCGCCTGGAGCGTCTCGGGATCTCCCGCTACTTCCAGAAAGAGATTGAGCAGTGCATGGACTACGTGAACAGGCACTGGACTGAGGACGGGATCTGCTGGGCGAGGAACTCCGACGTGAAGGAGGTGGACGACACGGCCATGGCTTTCCGCCTGCTACGGCTGCACGGATACAGCGTCTCGCCAGGTACGTAACAAACACAAAAAAAAAAAACGCGCAGACAACAGAGATCGTCACGTCATACACACGCGTGTCCTGAACATTTTTCATTTGGTCTCCCACCCATCGTACGTAATAATAATAAAAAAAAACGTGCTTCTGCCCTGCCTGTGTACGTGTAGATGTGTTCAAGAACTTCGAGAAGGACGGGGAGTTCTTCGCCTTCGTGGGGCAGTCGAACCAGGCGGTGACGGGGATGTACAACCTCAACAGGGCCTCCCAGATAAGCTTCCCGGGGGAGGACGTCCTGCACCGTGCAGGGGCTTTCTCGTACGAGTTTCTCAGGCGGAAAGAGGCCGAGGGAGCGCTCCGTGACAAATGGATCATATCTAAGGACCTGCCTGGGGAGGTAGTGTACACCCTGGACTTCCCTTGGTATGGGAACCTGCCGCGCGTGGAGGCGAGAGACTATCTGGAACAGTACGGCGGCGGCGACGATGTCTGGATCGGGAAGACGCTCTACAGGTAGATAGATCTTTTTAGCTATTAATTGGTTTCAGATCGACCAGATAAAATTTGCATTATTGGTTCTTTTGATGCATGTAATTGAAAGCCAATAAATAACCTCAGTATGCGTGATGGCTGACTTTTGCATTGGCAGGATGCCTCTTGTGAATAACGATGTGTATCTTGAGCTGGCTAGGATGGACTTCAACCATTGCCAAGCCCTACATCAGCTTGAGTGGCAAGGCCTGAAAAGGTATGTATGTTACTATATATATACAGCCCGGTTGTTGAGTTTTTTTTTTATTTTATTTTTTTCGCGATTACCATTTCTTCTCGATGCAAAATAAATCTGCACAGATCATCATATATATCCTTGATGATATATAAGGGCTTCTCGTATATATATCTTATCACCTATATATACATAGGTGGTACACTGAGAACCGGCTCATGGATTTCGGAGTGGCGCAAGAGGATGCTCTGCGAGCGTATTTCCTGGCCGCCGCTTCCGTCTACGAGCCGTGCCGAGCCGCGGAGCGGCTTGCGTGGGCCAGAGCGGCGATACTTGCCAACGCCGTCTCTACCCATCTCCGTAACAGCCCCTCATTCAGAGAACGCTTGGAACACTCCTTGCGTTGCCGCCCCAGTGAAGAAACGGATGGATCATGGTAATAAGCTGATCGATGGGAAATTAAAAATTTAAGTTTTTTTTTTCTTTTTTGTTGCCATTATCTGAGACCAATGCAATGTGGTGCATATATATCCAGGTTCAACTCATCAAGTGGAAGTGACGCTGTTCTTGTGAAGGCAGTTCTGCGGCTTACCGACTCGTTAGCGCGAGAAGCGCAGCCGATTCATGGCGGTGATCCGGAGGACATCATCCACAAGCTACTGAGATCAGCTGTAAGTTAAACGTAACGTTCAGAAGAAGATTTTTTTTTTTTTTTGCAGTTAACAAGTACTACGACATCTATCGTTTTTGTTCAGCATGCACAGTCATCCTAGCTACTAATACCATTATTCTTCTGTGAACTTGTGTAGTGGGCTGAATGGGTCAGGGAGAAGGCAGATGCAGCAGACAGCGTGTGTAATGGATCCAGTGCTGTGGAACAAGAAGGGTCGCGCATGGTTCATGACAAGCAAACGTGTCTGCTTTTAGCTCGAATGATCGAGATCAGCGCTGGGCGAGCTGCAGGTGAGGCTGCGAGCGAAGATGGTGACCGTCGGATTATCCAGCTCACTGGGTCTATATGTGACAGTCTCAAGCAGAAGATGCTAGTATCTCAGGTATAGCACATATATACTACAGAAAGTTTGTGCGTAGTTATTATTTCCCTTTTTTCATGTGACGAACATGATGACCTGATGATGCATGTATATGGCTTCATATAGGACCCCGAGAAGAACGAAGAGATGATGAGCCATGTCGATGACGAATTGAAGCTGCGTATACGAGAGTTCGTTCAGTATCTTCTGAGACTCGGTGAGAAGAAAACCGGCAGCAGCGAGACAAGGCAGACCTTTCTGAGCATCGTGAAAAGCTGTTACTACGCTGCTCACTGCCCGCCGCATGTGGTAGACAGGCATATTTCCAGAGTTATTTTTGAACCTGTTTCCGCCGCAAAATAATGGTAATGGTAGATGTGAATGTGATATGGAGATAAGAGAGAGAGAAAATGTTGATAGTGGAAATTGGCGTTGATGTCGCCTCCACATTCTTTACGCAAAAGTAGCGTCTGTTTTGGATAAAAAAAATCCAGTTTCTGTAAATTATAGAATAAATCAATCGCTGTGTCCCAAACTCTAAAATGTTATTCTGTGAAGTATGGAATAAATCGGTCACTATACCTATCTTGTGGATGCMVLSSSCTTVPHLSSLAVVQLGPWSSRIKKKTDTVAVPAAAGRWRRALARAQHTSESAAVAKGSSLTPIVRTDAESRRTRWPTDDDDAEPLVDEIRAMLTSMSDGDISVSAYDTAWVGLVPRLDGGEGPQFPAAVRWIRNNQLPDGSWGDAALFSAYDRLINTLACVVTLTRWSLEPEMRGRGLSFLGRNMWKLATEDEESMPIGFELAFPSLIELAKSLGVHDFPYDHQALQGIYSSREIKMKRIPKEVMHTVPTSILHSLEGMPGLDWAKLLKLQSSDGSFLFSPAATAYALMNTGDDRCFSYIDRTVKKFNGGVPNVYPVDLFEHIWAVDRLERLGISRYFQKEIEQCMDYVNRHWTEDGICWARNSDVKEVDDTAMAFRLLRLHGYSVSPDVFKNFEKDGEFFAFVGQSNQAVTGMYNLNRASQISFPGEDVLHRAGAFSYEFLRRKEAEGALRDKWIISKDLPGEVVYTLDFPWYGNLPRVEARDYLEQYGGGDDVWIGKTLYRMPLVNNDVYLELARMDFNHCQALHQLEWQGLKRWYTENRLMDFGVAQEDALRAYFLAAASVYEPCRAAERLAWARAAILANAVSTHLRNSPSFRERLEHSLRCRPSEETDGSWFNSSSGSDAVLVKAVLRLTDSLAREAQPIHGGDPEDIIHKLLRSAWAEWVREKADAADSVCNGSSAVEQEGSRMVHDKQTCLLLARMIEISAGRAAGEAASEDGDRRIIQLTGSICDSLKQKMLVSQDPEKNEEMMSHVDDELKLRIREFVQYLLRLGEKKTGSSETRQTFLSIVKSCYYAAHCPPHVVDRHISRVIFEPVSAAK

SEQ ID NO: 97 - DNA, 2784 bp, Oryza sativa indica
actacgccgagacagtgtggtggtgagccggtgatcgatcttgcatcttgcgagcacacgggattccagatcgatcgagctatagctagctagctaattagttaccacgtacgaacgagtactttacaactcgatcagttcatcaaattaactcgatcagtggttaagtttcgcacgacacacgcgcgcggatcggaagccatcatgcagatgcaggtgctcaccgctgcttcttcgctccctcgcgcgaccttgctccggccggcggctgccgagccatggcgccaatctttcctgcagctgcaggctcgtccaatccagcgaccaggtatcatgctacactgcaaggcccagctacaggggcaggaaacgcgcgagcgtcgtcagctcgacgacgatgaacacgctagaccaccacagggcggcgacgacgacgtcgcagcaagcaccagcgagctaccctacatgatcgagtccatcaaatccaagctgagggcggccaggaacagcctcggcgagaccaccgtctccgcctacgacacggcgtggatcgcgctcgtcaaccgcctcgacggcggcggcgagaggagcccccagttcccggaggccatcgactggatcgcccggaaccagctgcccgacggctcgtggggcgacgccggcatgttcatcgtccaggaccggctcatcaacacgctgggctgcgtcgtggcgctcgcgacgtggggcgtccacgaggagcagcgcgcgaggggcctcgcctacatccaggacaacctctggaggctcggcgaggacgacgaggagtggatgatggtcgggttcgagatcaccttccccgttctcctcgagaaggccaagaacctgggcctggacatcaactatgatgaccctgccttgcaggacatatatgccaagagacaattaaagctcgcaaagattcctagagaagcactgcatgctaggccgaccaccttgctccatagcttagagggaatggaaaacttggactgggaaaggttgctacagttcaagtgtccagctggctccttacattcctcacctgctgcgtcagcttacgctctcagcgaaacaggtgacaaggagttgctcgaatacctggaaacagccatcaacaattttgacggtggagcaccatgcacctaccctgtcgacaactttgaccgcttatggtcggtcgatcggttgaggcggctaggaatatcgaggtacttcacgagtgagattgaagaatacttggagtacgcctacaggcacctgagtccagatggcatgagctacggcgggctctgtccggtcaaggacatcgacgacacggccatggctttccgtctcctccgtctgcatggctacaatgtctcatcatcggtgttcaatcacttcgagaaggacggggagtacttctgcttcgcggggcagtcgagccagtcgctgacggcgatgtacaactcctaccgcgcctcgcagatcgtcttccccggcgacgacgacggcctggagcagctcagggcctactgccgcgccttcctcgaggagcggcgagccaccggcaacctcagggacaagtgggtcatcgccaatggcttgcccagcgaggtcgagtacgcgctggatttcccatggaaggcaagcttgccgcgagtcgagacgagggtgtatctggagcagtacggcgctagcgaggacgcgtggatcggcaagggactctacaggatgaccctagtcaacaacgacctgtaccttgaggcggcaaaggctgacttcaccaacttccagaggctctcccggctcgagtggctcagcctgaaaaggtggtacatcaggaacaatctgcaagcgcacggcgtgaccgaacagagcgtgctgagagcctacttcttagccgcggcgaacatcttcgagcccaaccgggcggcggaacgcctgggatgggctcgcacggcgatcctcgccgaggccatcgcgtcacacctccgacagtacagtgccaacggcgccgccgacggcatgacagagaggctcatcagtggactcgccagccacgactgggactggagggaatcaaacgattcagcagcgaggagcttactgtacgcacttgatgagctcatcgacctccatgcgttcggcaatgcttctgacagcctacgtgaagcgtggaagcagtggctcatgtcatggacaaacgagagccaaggatcaactggtggggataccgcattgctgctagttcgcacaatcgagatctgctcaggacggcacggttcagccgagcagagcctgaagaacagtgaagactacgccaggcttgagcagatcgcctcttccatgtgcagcaaacttgccaccaaaattcttgctcagaatggaggaagcatggacaacgttgagggtatagaccaggaagtggatgttgagatgaaagagctcatccagcgtgtctacgggagcagcagcaacgatgtcagcagcgtgacgaggcagacatttctcgacgtggtgaagagcttttgctacgtcgctcattgctcgcccgaaacaatcgatgggcacatctccaaggttttgttcgaggatgtcaattaggaaaatggttgactactagaaaggcaataaaaacaagagttgtgtctaccagcatggctcgtaaagtgatgactgcgaaaattttctcaaagtgagatgaatttagtcgatatttgtttcacttgatggtacaccagatacacatgttgttataaaaaaaaaaaaaaaaaaaaaaaa

SEQ ID NO: 98 - protein, 800 aa, Oryza sativa indica
MQMQVLTAASSLPRATLLRPAAAEPWRQSFLQLQARPIQRPGIMLHCKAQLQGQETRERRQLDDDEHARPPQGGDDDVAASTSELPYMIESIKSKLRAARNSLGETTVSAYDTAWIALVNRLDGGGERSPQFPEAIDWIARNQLPDGSWGDAGMFIVQDRLINTLGCVVALATWGVHEEQRARGLAYIQDNLWRLGEDDEEWMMVGFEITFPVLLEKAKNLGLDINYDDPALQDIYAKRQLKLAKIPREALHARPTTLLHSLEGMENLDWERLLQFKCPAGSLHSSPAASAYALSETGDKELLEYLETAINNFDGGAPCTYPVDNFDRLWSVDRLRRLGISRYFTSEIEEYLEYAYRHLSPDGMSYGGLCPVKDIDDTAMAFRLLRLHGYNVSSSVFNHFEKDGEYFCFAGQSSQSLTAMYNSYRASQIVFPGDDDGLEQLRAYCRAFLEERRATGNLRDKWVIANGLPSEVEYALDFPWKASLPRVETRVYLEQYGASEDAWIGKGLYRMTLVNNDLYLEAAKADFTNFQRLSRLEWLSLKRWYIRNNLQAHGVTEQSVLRAYFLAAANIFEPNRAAERLGWARTAILAEAIASHLRQYSANGAADGMTERLISGLASHDWDWRESNDSAARSLLYALDELIDLHAFGNASDSLREAWKQWLMSWTNESQGSTGGDTALLLVRTIEICSGRHGSAEQSLKNSEDYARLEQIASSMCSKLATKILAQNGGSMDNVEGIDQEVDVEMKELIQRVYGSSSNDVSSVTRQTFLDVVKSFCYVAHCSPETIDGHISKVLFEDVN

SEQ ID NO: 99 - DNA, 2635 bp, Hordeum vulgare subsp. vulgare
ggaacgtgcattgccgcagccagcatgctgctgctcttgccgctggcgtgtccgccatcgggctacggccacggaccgcggacgcgtgctctcgccgtcaaaggtccatgccgtttccgtggcaaaggagatgctgcccttgtggaaaccgccggcttgcgcgtcgctctccagattacgcaggcctccagcgtatccagttctaatggattgcaaacgaaccttgtcagaaatgatatccggattctagaacagaccgaggaaccgtgtgaacttgacgactactgtgtgacagagttcgagcagccactggtcgacaaagtgaggatgatgctagggtcgatgagtgacggcgagatcaacgtctcggcatacgacaccgcctgggtcgctctggtaccgagtcttgatgacggtgacagcccccagtttcccaccaccctccggtggattcttgacaaccagctcccagacggctcctggggagatgctgccttgttctccgcctttgatcgggtcattaacacccttgcctgtgttgtggctctcacaaagtggtcccttggccctgataaatgcaggagagggctatcttttctggaggaaaacatgtggaggctagcagaggaagacctggagtcgatgcccatcggcttcgagattgcgttcccttctctcctggaggtggccaagagcttgagcattgggttcccgtatgaccaccatgctctgcagcgcatatatgccaacagagaagtgaagctcaagaggatcccgatggagatgatgcacaagattccaacgtcgatcctgcattcccttgaagggatgcccggggtggactggcagaaaatcctcaggctccagtctagcgatgggtccttcctctattctccttcggctacagcctgcgctctcatgcaaaccggtgacgcgaaatgcttcgaatacatcgacagaatcgtcaagaaattcaacggaggagttcccaatgtttacccggtcgatctctttgagcgcatctggtccgtcgatcggttagagcgtcttggaatctcgcgctatttcaagcaagaaatcaagcagtgcttggattatgttcacaggcactggactgatgaggggatttgctgggcgaggaactccactgtaatagacgtggatgatacatccatggcattccggctgctgcggcttcatggatacgatgtctccccaagtgtatttgggaagtttgagaaggacggggagttcttctgtttcgtggggcaatcaacacaagcagtcactgggatgtacaacctgaacagggcctctcaggtaaggttccctggagaggacttgttgcagcgtgcagggagattctcgtatgagttccttagagaaagggaagcccatggcacgattcgagacaaatggatcattgctaaggatctaccaggcgaggtaaaatatacactggacttcccatggtatgcaagcttaccgcgtgtagaagcaagagtctacctagatcaatatggcggtgataatgatgtctggattgggaagacactctacaggatgctacttgtgaacaacaacacctatcttgagttggcaaagcgtgatttcaatcgctgccaagtccaacatcagcttgagtggcatggcctgcaaaagtggtttattgagaatggcctcgagacttttggggtgactttaagagatgttttgagagtttattttctagctgccgcttgcattttcgagccaagccgtgccaccgagcgacttgcatgggccaaggtgtcagtgctggccaacattattactaaaaaccttcatagcgatttgtcgggtaatgaaatgatggaacggtttatgcatggcggtatctacgaaggaaatagtaatatatcttggcgtaaaggagatgcaaaagaggacagtcttgtgggggcacttgagcagcttattgatttgttggcacaagaggcactacttgttggtgaagaaccaatgtacatcaacaatttgttacgccgcgcttggatcgaatggatgatggaacagataaatagagaggatgacacatccgatacaagtgttattcaagcagggtcatgcatggttcatgataaacaaacatatttgcttctagtcaaaattattgagatttgtggtggacgatatggtgaagcatcatcgatgataaacaacatggattgtgcctggtttattgagctcgcgtcctctatttgtgacagtcttcaccgcaagaggttactttctcaggacactgagaagaacgaggtgatggtgcgccacatggatgagaaaatcgaggcgggcatgcaggaactcgcccggaacgtcctccagtcggcgcacggcgatggggcgagcagcgagacgaagcagaccgtattgagcattgtcagaagctgttactacgccgctaactgccctctccatgttttggatggtcatgtcttgaaggtcattttcgaacatgtgttttgaaagaaagaaagaaagaagaaattgtcctgcaatggtagggatggatgggatatgtatgtatgtacatggaaaagaatgctgtaaaaagtaacagtggaagaattgtcaagttggattggttgtttggtcc

SEQ ID NO: 100 - protein, 826 aa, Hordeum vulgare subsp. vulgare
MLLLLPLACPPSGYGHGPRTRALAVKGPCRFRGKGDAALVETAGLRVALQITQASSVSSSNGLQTNLVRNDIRILEQTEEPCELDDYCVTEFEQPLVDKVRMMLGSMSDGEINVSAYDTAWVALVPSLDDGDSPQFPTTLRWILDNQLPDGSWGDAALFSAFDRVINTLACVVALTKWSLGPDKCRRGLSFLEENMWRLAEEDLESMPIGFEIAFPSLLEVAKSLSIGFPYDHHALQRIYANREVKLKRIPMEMMHKIPTSILHSLEGMPGVDWQKILRLQSSDGSFLYSPSATACALMQTGDAKCFEYIDRIVKKFNGGVPNVYPVDLFERIWSVDRLERLGISRYFKQEIKQCLDYVHRHWTDEGICWARNSTVIDVDDTSMAFRLLRLHGYDVSPSVFGKFEKDGEFFCFVGQSTQAVTGMYNLNRASQVRFPGEDLLQRAGRFSYEFLREREAHGTIRDKWIIAKDLPGEVKYTLDFPWYASLPRVEARVYLDQYGGDNDVWIGKTLYRMLLVNNNTYLELAKRDFNRCQVQHQLEWHGLQKWFIENGLETFGVTLRDVLRVYFLAAACIFEPSRATERLAWAKVSVLANIITKNLHSDLSGNEMMERFMHGGIYEGNSNISWRKGDAKEDSLVGALEQLIDLLAQEALLVGEEPMYINNLLRRAWIEWMMEQINREDDTSDTSVIQAGSCMVHDKQTYLLLVKIIEICGGRYGEASSMINNMDCAWFIELASSICDSLHRKRLLSQDTEKNEVMVRHMDEKIEAGMQELARNVLQSAHGDGASSETKQTVLSIVRSCYYAANCPLHVLDGHVLKVIFEHVF

SEQ ID NO: 101 - DNA, 1189 bp, Nicotiana tabacum
  misc_feature (459)..(459): n is a, c, g, or t
  misc_feature (958)..(958): n is a, c, g, or t
ccgcttatgataccgccttgggttgctctagtaaaagatataaatggaacaagtgaaactcctcagttcccttcaagtcttaaatggattgcaaacaatcagttggctgatggttcttggggtgacagctctatctttttggtttatgaccgtgtcatcaacacattagcctgtgttattgccttgaaatcttggaacgtggattctcacaagtgtgaattaggaatgtcgtttataagagagaatttgaacagtattggagatgaaaatgcagagcacatgcctatcggatttgaagtggcatttacttcgctcattgagattggtaaaaaattaggcatagattttccttatgattctcccatccttgcagcgaattatgcccgaagaacactaaagctgacatggataccaaaggacataatgcacaaagtcccacaacgttactccacagtttanaaggaatgccagatttggactggcaaaagctacttcaattgcaatgtgctgatgggtcatttctgttttctccatcttctactgcctttgcacttatgcaaactcaagataataattgcctcaattatctcgcaaatgttgttgaaaaaattcaatagcggagttccaaatgtctatcctgtggacttatttgagcatatttggatcgttgaccggttggaaagacttgggatttctcgctattttaagacagaaataagaaggaatgtattgattacgtcaacagaaattggacaaatgaaggaatctgctgggctagaaattccccagttcaagacatcgatgacactgcaatggcttagacttttaaggttgcatggctacgtcgtttctgctgacgtattcaaacattttgagaacgggggtgaatttttctgcttcgtgggacaatcgaaccaggctgtgacaggaatgtataacctttacaggcttctcagcntaatgtttccaggcgagaaaatacttgacaatgccaagaaattctcctctaattttctacgagaaaaacgagatgaaaatgaactgctagacaagtggataatcactaaagatttacctggagaggtgggatatgcattagatgtaccatggtatgctagccttccccgagtagaaacaagattctttctagaacaatatggtggtgaagacgatgtgtggataggaaaaa

SEQ ID NO: 102 - protein, 396 aa, Nicotiana tabacum
  misc_feature (153)..(153): Xaa can be any naturally occurring amino acid
  misc_feature (320)..(320): Xaa can be any naturally occurring amino acid
PLMIPPWVALVKDINGTSETPQFPSSLKWIANNQLADGSWGDSSIFLVYDRVINTLACVIALKSWNVDSHKCELGMSFIRENLNSIGDENAEHMPIGFEVAFTSLIEIGKKLGIDFPYDSPILAANYARRTLKLTWIPKDIMHKVPQRYSTVXKECQIWTGKSYFNCNVLMGHFCFLHLLLPLHLCKLKIIIASIISQMLLKKFNSGVPNVYPVDLFEHIWIVDRLERLGISRYFKTEIRRNVLITSTEIGQMKESAGLEIPQFKTSMTLQWLRLLRLHGYVVSADVFKHFENGGEFFCFVGQSNQAVTGMYNLYRLLSXMFPGEKILDNAKKFSSNFLREKRDENELLDKWIITKDLPGEVGYALDVPWYASLPRVETRFFLEQYGGEDDVWIGK

SEQ ID NO: 103 - DNA, 2469 bp, Cucurbita maxima
atgaaagctctctctctctctcgcccttttccttgctcctccgatgccaccaagctctcctcccggccgccaccaccgccgccgggtagctgttcattcaaggttgaatccatcaggagtagcagaatcatcaaatgcaatgctatttctaagcctccagctcaagagtacagcgatgtgcttcaaagcggcgtgccagttataaagtggcagcagtttgtggaagatgacatagtatcagaaactaccgcacacgtgttgatttctaaagagatagaggagagagtgaaccggataaagtcaatgctgagctcgatggacgacggtgacataagcatctcggcttatgacacggcctgggtggcgctaataccgagagttcttgatggtgttaagactccgttgttcccttcttcgcttgaatggatagcacagaatcaactccctgatgggtcgtggggcgacagtggaatattctcagctcatgatcgaattctcagtaccttggcttgtgttttggcgttgaattcatggaagctccaccctgacaagtctgagaaaggcatggttttcttaaacaagagcatttccaagctggaagatgagaacgccgagcacatgctgattgggtttgaggttgccttcccgtcgttgatggagtttgctaaaaggttgaacctccaagtccccacggactcgccggtgctgcaagagattaaccacagaaggagcataaagttaacaaggataccaaaggaaataatgcataaagtgcccactacgttattgcatagtttggaagggatggaaggcatggagggtttggattggggaatgcttctgaaattgcaggctccagatgggtctttcttgaaatctcctgcttccactgcctttgcattcatgaaaaccaataactcaaattgcttcaaatatttggaatcggttgtcagccgctttaatggcggagtacccaatgtgtaccccgtggatttgttcgaacatatttgggctgtggatagattacaacgacttggggtttcaagattttttcacccagaaatcgttgagtctgtggattatttgcggagacattggactgataaagggatatgttgggcaagagatgtggagttttatgatatcgacgacaccgccatgggattcaaacttctccggctgttcggccacgaagtttctgcagaggtgttcaagaatttcgagaaagatggggagttcgtgtgcatagcggggcaatcgacgcaggcggtgaccgggatgttcaacctgtaccgggcttccgatcaggtaatgttcccgggggagaaaattctggaggatgcaaagcaattttcctacaaattcctcagagagaaacaggctgctgatgagcttttggacaagtggatcatcaccaaggacttgcctggagaggttggttatgctcttgatgttccatggtttgcgagtttacctcgggtcgagactcgttacttcatagaacagtatggtggggaaaatgatatttggataggcaaaactctctacaggatgttcaaggtaaacaatgacacatacttggagcttgcaaaattggactacaacaaatgccaactattgcatcagaatgagtgggttgatattcaaaaatggtacacagagaacaatctgagagattatggaatgagaagaaccagccttttgttctcatattttggtgcagcgtgtagcattttcgaaccagagagggctaaggagaggcttgcatggaccaaaacggctgcgttggtcggagccattgagtcccatttcaaggacgccaatgctgaccaacgacgagccttcatccaacaattcataaacttcgatgcaatagatcaagcctacgatactaatgcgtggagggcaggcaatgtgcagcaaaagggaggaggacaaggactagttgggattttgcttcgaactctaacgagtatctcgttggatatattggtgtcgcatggtttcgacatcacccaccatttgcatcaagcttgggagaaatggctgtttaagtggcaagaagatggagatgtgcacaaggaagaggcagagttattggtgggaacaataattctcaactcaggctgttcaactttggaggatctgttgtccaatcctcaatatcagaagctttcctacctcacaaacaaagtgtgccatcaactaggtcactttaaaaagcacaaggtaacgaacggtgggatctataaggagaaaacagagaacaaaatgcccccagagatagaagaagacatgaggaaacttatgcagatggtgatccaaaactcctcagatggcaatgacattgactcaccaatcaagaacacatttctaacggtagcaaaaagttcgtactatgcagcctatttcgatccttggactatcaactaccacattgccaaggtcctatttgaaagagtcttctaa

SEQ ID NO: 104 - protein, 822 aa, Cucurbita maxima
MKALSLSRPFPCSSDATKLSSRPPPPPPGSCSFKVESIRSSRIIKCNAISKPPAQEYSDVLQSGVPVIKWQQFVEDDIVSETTAHVLISKEIEERVNRIKSMLSSMDDGDISISAYDTAWVALIPRVLDGVKTPLFPSSLEWIAQNQLPDGSWGDSGIFSAHDRILSTLACVLALNSWKLHPDKSEKGMVFLNKSISKLEDENAEHMLIGFEVAFPSLMEFAKRLNLQVPTDSPVLQEINHRRSIKLTRIPKEIMHKVPTTLLHSLEGMEGMEGLDWGMLLKLQAPDGSFLKSPASTAFAFMKTNNSNCFKYLESVVSRFNGGVPNVYPVDLFEHIWAVDRLQRLGVSRFFHPEIVESVDYLRRHWTDKGICWARDVEFYDIDDTAMGFKLLRLFGHEVSAEVFKNFEKDGEFVCIAGQSTQAVTGMFNLYRASDQVMFPGEKILEDAKQFSYKFLREKQAADELLDKWIITKDLPGEVGYALDVPWFASLPRVETRYFIEQYGGENDIWIGKTLYRMFKVNNDTYLELAKLDYNKCQLLHQNEWVDIQKWYTENNLRDYGMRRTSLLFSYFGAACSIFEPERAKERLAWTKTAALVGAIESHFKDANADQRRAFIQQFINFDAIDQAYDTNAWRAGNVQQKGGGQGLVGILLRTLTSISLDILVSHGFDITHHLHQAWEKWLFKWQEDGDVHKEEAELLVGTIILNSGCSTLEDLLSNPQYQKLSYLTNKVCHQLGHFKKHKVTNGGIYKEKTENKMPPEIEEDMRKLMQMVIQNSSDGNDIDSPIKNTFLTVAKSSYYAAYFDPWTINYHIAKVLFERVF

SEQ ID NO: 105 - DNA, 2484 bp, Scoparia dulcis
atggcattggccactttcctccgatcaccaccttcacccggcgttttcgcggcggccttacatgttccttcctccagcacttttggccgtaccaccacctatgttttcccctcttattcatggaaaacacctgtcacttccagtaacacttcgccgtgtaatgcaatttccagacctcgtaccgaagaacgaatagacctgatccggaatggatttcctacgataaattactggcatgagattgtggaggatgacacacaactagaaataactcatagggagacagcaatatcatcaaacaagatatgggagatggtgaagacgatccgagggatgctgcggtcgatggaggacggagagataaccgtatcggcgtacgacaccgcatgggtggcgttggtggaggatatcggcggcagtggcacgccgcagttcccgtcgagtctggagtggatttcgaacaatcagctcccggacggctcgtggggcgacggcgccaccttttcggcccacgatcgtataatcaacacattagcttgtgttattgcattgagaacttggaacatgcactctgacaaaagtgatagagggatcgcgttcattagagagaacatgtacaagctagaggatgaaaatgaggagcacatgccaatcgggttcgaagtggcattgccatcactgattgaaatagcaaaaaagattgacattgatatccctgatgaatccccaatttttgaaaagagattacgcaaaaagagatttaagctgaaaaggataccaagggacataatgcacaaagtgccaacaacactactccacagcttggaaggaatgccggccttggattgggaaaagctaataaatctgcaatcagccgatggatcattccttttctcgccatcctccactgcctttgccctccagcaaaccaaagaccataactgcctccattatccggccagacacctccaaaagttcaatggcggagtgccaaacgtatatccggtggacttgttcgagcacctctgggcagttgataggttggaaaggcttggactttcccgatattttcaaccagaaattgaagaatgcatcgactatgttcacggacactggacaagtaaaggtatctgctgggcaagaaattctgaagttaaagacatcgacgacactgcaatgggattcaggcttctcaaactgcacggctacgaagtttccgcggatgttttcaagcatttcgaaaatggaggggaatttttctgcttcgtgggacagtcgacacaggccgtgaccggaatgtacaacctgttcagggcttctcaggtgatgttccctggagaagatatactctccaacgccaaaagcttcttgtcgaaatttctgcaagaaaaacgagctaataatgagctgttggataagtggattatcaccaaagatcttccaggcgaggtgggatatgcactagatgtgccctggtacgcaagcctgccccgagttgaaacaagactctacttggaacaatacggcggccaagacgacgtctggatcgggaaaactctttacaggatgccatatgtcaataataacacctatctcgagctggcaaaattagactacaacaattgccaggcctcacatcagcaagagtggaagagcattcaaaaatggtatagtcgttgcaattttggggagtatggaatgagtgaaagaagcctactcctagcttattatattgccgccgcatccatatttgagccagagagagcactagagcgtctggcttgggctaaaaccgcgattttaatggagacaatagagaccattttgaaggacaactcttctcaagagagcggaaacgtgctttcgtcaatgaatccaaacttgatggcagccgcatgcatgcaaacggagcaagtcgcaggtataacaaaacaggaacgtctaacggagaccctggttagggcttctaaaccacttctcattgggacacgttgttggcacacggcagggacatccatcagcaattgtatcatgggtaggaaaagtggcttaagaacatgcgaagagagagatgtgcacagcgggcaaggggatgcagagctgcttgtacgcacgttaaatttatgtggaggcggcggccgttgggtgtcggaggagctattgttatcccatcccaagtatcaacatctcttggaagtcacaaacagagtctgccaccaacttcgtctatttcaacgacgacaggcctgtgatgtaaatggcggttgcatgacagacgtgggaggcatcctaagcgcccagatagaatcaaacatgcaagaactagcgaagttggtgcccaccaaatcatcctcaggagacttagattctgacacaaagcaaaacttccttactgtcgccaggagtttctactatgcggtctattgtaatcctggaagtatcaattttcacatagccaaagttctcttcgaaagagtgctctaa

SEQ ID NO: 106 - protein, 827 aa, Scoparia dulcis
MALATFLRSPPSPGVFAAALHVPSSSTFGRTTTYVFPSYSWKTPVTSSNTSPCNAISRPRTEERIDLIRNGFPTINYWHEIVEDDTQLEITHRETAISSNKIWEMVKTIRGMLRSMEDGEITVSAYDTAWVALVEDIGGSGTPQFPSSLEWISNNQLPDGSWGDGATFSAHDRIINTLACVIALRTWNMHSDKSDRGIAFIRENMYKLEDENEEHMPIGFEVALPSLIEIAKKIDIDIPDESPIFEKRLRKKRFKLKRIPRDIMHKVPTTLLHSLEGMPALDWEKLINLQSADGSFLFSPSSTAFALQQTKDHNCLHYPARHLQKFNGGVPNVYPVDLFEHLWAVDRLERLGLSRYFQPEIEECIDYVHGHWTSKGICWARNSEVKDIDDTAMGFRLLKLHGYEVSADVFKHFENGGEFFCFVGQSTQAVTGMYNLFRASQVMFPGEDILSNAKSFLSKFLQEKRANNELLDKWIITKDLPGEVGYALDVPWYASLPRVETRLYLEQYGGQDDVWIGKTLYRMPYVNNNTYLELAKLDYNNCQASHQQEWKSIQKWYSRCNFGEYGMSERSLLLAYYIAAASIFEPERALERLAWAKTAILMETIETILKDNSSQESGNVLSSMNPNLMAAACMQTEQVAGITKQERLTETLVRASKPLLIGTRCWHTAGTSISNCIMGRKSGLRTCEERDVHSGQGDAELLVRTLNLCGGGGRWVSEELLLSHPKYQHLLEVTNRVCHQLRLFQRRQACDVNGGCMTDVGGILSAQIESNMQELAKLVPTKSSSGDLDSDTKQNFLTVARSFYYAVYCNPGSINFHIAKVLFERVL

SEQ ID NO: 107 - DNA, 2490 bp, Croton sublyratus
atgtcttctcaggcgttctctcttctgtcttcccttccttcctcttctttttctagcactcgtcctcgtcttttcctaggtgtttggtacgagcttcaaggccagcggataagctttaatcttcgcccaagatgcactgacttatccatcacttacactaacgaatatgtccacggagaaatggcagtgattaacccgccggaagatgatacagaagagcaagtacctaaggtgacgaattccatttgcgtgaaatttaataataaagaaaaaaagagctacatttatgattatgagtataatttgattttaaagttgttgattaaggttgcgatatcaaaagagataatgagaagtgtagagagaattaaaaagatgctgaaatccatggaggatggagaaataaacatatcagcatatgatacagcttgggtacgtctagttaaagatgtaaatggaagtggagaacctcaattcccatcagctcttcagtggatttcaaataatcaattaccagatgggtcttggggtgatgctcttgtttttaatgcgcatgatcgtattctcagtactctggcttgtgttgtcactctcaagtcctggaatttacaccctcataaggttgcaaaaggtctgaaattttttaaagaaaatctgagcaaacttgaagaggagaacgaggagcacatgtctattggatttgaagtggtttttccttcacttctggagcttgcaaggaaattagacattgacgttcctgatgattctcatgtcttacaacagatttgtgaatgcagaaatacgaagctcaaaaagatacccaaagatataatgcacaaaatgcccacctcactactccatagcttggaaggaatgcctgatcttgagtgggaaaagctcttaaaattacagttcgacaatggctccttcctcttctctccttcctccactgcttacgctttcatgcaaactcaagatgataaatgtttaatctatttaaacaggattgtccaaagatttaatggtggagtaccgaatgtttatccagttgatcttttcgagcacacttgggctgctgatcgcttgcaacgccttggaatctcgagattatttgagcaagagcttaaagaatgtatgaattacgtcgctagatattggagagaagatgggatgtgctgggcgagaaattctaatgttcgtgatgttgatgactcgtcgatgggattcagaatgcttagattatatggtcataatgtttctgcggatgtgttcaagaaattcaaaaaagatgatacttgggtctgcatgcctggacaatcaacgcaggccattaccggaatgtataatttgtttcgagcttctcaggttctatttccaggagaaatgattcttgaagaagctagggaattttgttatgatttccttagggaaaagcaatctgctaatgcagtcgtagataaatggattatttccaaggatttaccaggagaggttgcatatgcgttggatgtgccatggtttgccagcttacctacagttgaggcaagattctatattgaacaatacggtggagatgatgatgtatggattggtaaggttctgtatagaatgccatttgtgaataacaatgagtatttggaacttgctaagtttgactacaatagttgccaagcactgcaccgtgctgaatgggacaattttcaaaagtggtatgatgaatgtaatttgggggattttggggtaagtaaaagagagcttctactagcatattacataagcgcagcaagcatttttgagccagaaaagtctaaagaaaggcttgcatgggccaaaactagtattttgctacaaactattgatgcttatttccacaccaacaactccattgaggagaggaaagatttcgtacaccaatttaacatggagctcctgctccctcacttggaatggaatagacaggaaaatggaagagaagacaaagcaggaacttgtcggaattatacttggaaccttaaacgatgtcccttggatgcactggtggctcatggcacagacattagtcacagtttgcgtcatgcttgggaaattgggctcacaaattgggaaaaagatggagacaagcaccgcggaaaagcggaacttattgtgaaaactattaatctaacaactggtccttgggtgtccgaagaacttttaaactgtaattctaaatatgaaaagttgtttcaactttctaattatttgtaccatcagcttggtcattttaacaaaaacaaggtggatgataaaaagaaatacacaactccagaaatagagtcaagcatgcaggaattggctcaattggtgctccaaaattcatcagacggacttgattctaatatcaagcaaactttctttacagtggttaaaagtatttactacactactgtttgcgatctcggaactaccaattaccatatgtccaaagtgctctttgaaagagtatattaa

SEQ ID NO: 108 - protein, 829 aa, Croton sublyratus
MSSQAFSLLSSLPSSSFSSTRPRLFLGVWYELQGQRISFNLRPRCTDLSITYTNEYVHGEMAVINPPEDDTEEQVPKVTNSICVKFNNKEKKSYIYDYEYNLILKLLIKVAISKEIMRSVERIKKMLKSMEDGEINISAYDTAWVRLVKDVNGSGEPQFPSALQWISNNQLPDGSWGDALVFNAHDRILSTLACVVTLKSWNLHPHKVAKGLKFFKENLSKLEEENEEHMSIGFEVVFPSLLELARKLDIDVPDDSHVLQQICECRNTKLKKIPKDIMHKMPTSLLHSLEGMPDLEWEKLLKLQFDNGSFLFSPSSTAYAFMQTQDDKCLIYLNRIVQRFNGGVPNVYPVDLFEHTWAADRLQRLGISRLFEQELKECMNYVARYWREDGMCWARNSNVRDVDDSSMGFRMLRLYGHNVSADVFKKFKKDDTWVCMPGQSTQAITGMYNLFRASQVLFPGEMILEEAREFCYDFLREKQSANAVVDKWIISKDLPGEVAYALDVPWFASLPTVEARFYIEQYGGDDDVWIGKVLYRMPFVNNNEYLELAKFDYNSCQALHRAEWDNFQKWYDECNLGDFGVSKRELLLAYYISAASIFEPEKSKERLAWAKTSILLQTIDAYFHTNNSIEERKDFVHQFNMELLLPHLEWNRQENGREDKAGTCRNYTWNLKRCPLDALVAHGTDISHSLRHAWEIGLTNWEKDGDKHRGKAELIVKTINLTTGPWVSEELLNCNSKYEKLFQLSNYLYHQLGHFNKNKVDDKKKYTTPEIESSMQELAQLVLQNSSDGLDSNIKQTFFTVVKSIYYTTVCDLGTTNYHMSKVLFERVY

SEQ ID NO: 109 - DNA, 2637 bp, Cucurbita maxima
atgtcctcctcctcctctctctctctctctcgccattgcctgtcttcttctttttccttccgtctcccaaacctcttcccaccacctgcacctggtggctgttcgctgagggttaaagacaaaggcgctgtgctggaatcaagcatccgatgcattatcaaatgcaacgccatttccaagcctcccactcaagactacagcgatgtgcttcaaagtggagtgccacttctaaagtggcagcagtttgtggaggagggcatagaatcagaaactgctgcccaggtgtcggtttgggaagagatagaggagcgagtgaagtggataaagtcaatgctgagttcaatggacgacggtgacataagcatctcagcttatgacacggcttgggtggctctaataccaaaagttacggaggagggagtgaagagtccgcagttcccttcttcccttgagtggatagccaacaatcaactcccggatgggtcatggggcgacgcccagatattctcaccccacgatcgcatcattaacacattggcttctctggtcgccttgaagtcttggaatcttcatccccaaaacacacggaaaggagtagccttcttcaaccaaaacatttggaagctggaagaggagaatgcggagcacatgccgatcgggttcgagattgctttcccttccctactcgaatttgccaagaaactaaagctgggaatccggagcgactccccggcgttgcaacagattaatgcccgcaggcgcctaaagcttgcgaggataccaaaggacataatgcacaaactgccaaccacgctattgcacagcttggaaggcatgagtggtttggattgggaaaagcttctaaaattgcaatctcaagacggctccttcttgagctccccagcctccactgccttcgctctcatgcacaccaaccacccaaattgcttcaaatatttggaagcatcggtgcaccgctttaatggtggagtacccaacgtgtaccctgtggacctgttcgaacacatttgggctgtggacagattgcaacgacttggaatttctcgattctttcacccacacattgttgagtgtgtgaataatgtgcgcacacactggagtgaaaaaggaatatgctgggccagaaattcggagtttcgcgacattgatgacacggccatgggattcagactgctcagactgtacggccacgatgtttcggcggaggtgtttaagcatttcgagaaagatggggagttcgtgtgcatagcgggccagtcaacgcaggcggtcaccggaatgttaaacttgtaccgagcttcggatcaggtaatgtttccgggggagaaaattctagaggacgccaaacaatttgcctccaagttcctcaggcagaaacaggccgccaatcagctcttagacaagtggatcatcgccaaggacttgcctggagaggttggttacgctcttgacgttccatggtttgcaagcttgcctcgggttgagacccgtctctacatacagcactatggtggcaaaaatgacgtctggattggaaaaactctctacaggatgttcaaggtcaacaacgatacatacttggagcttgcaaaattggactacaacaactgccaaagattgcatcagattgagtgggttgatattcaaaaatggtacacagaaagcaagctgcgagattatggaatgaggagaagcagcattttgttctcatattttggtgcagtgtgtagcattttcgaaccagaaagggccaaggagaggcttgcatggaccaaaactgctgctttggtccacaccattgcatcccattacaaggatgccaatgcccaccaacgacgagcctttctccaacaatttaccaactttcatgctgctcagccatacgataataatgcatggagatcaggcaatatgcagcagaagggaggagaaggactagttgggattttgctgcgaactctaacaaatatctcgttggatatactgttgtcgcacggcgtcgacatcacccaccatttgcaccaagcttggcaaaaatgggtgtttaagtggcaagaggatggagatgtgcacaaggaagaggcagagttattggtgcagacaataattctcaactcaggctgttcaactttggaggatctgttgtccaattctcagtttcagaagctttccaacctcacaaacaaagtgtgccatcaacttgctcactttaaaaagcataaggtaaataacggtaacctctataaggagaaaacagacaacaaaatgcccccagagatagaagaagacataaggaaacttgtgcagctggtgatccaaaaatcttcagatggcaatgacattgactcaccgattaagcaaacatttctaacagtagcaaaaagtgtgtactatgcagcttatttcgatgcttggactatcaactaccacatagccaaggtcctatttgaaagagtgttctaatcctagctacccacacacccatgttgtatttgtattgtcaaattttgtatattcttcaccacatgggacacaaaaactttggtctgtgtttcttctgtcaataaaaagacatcatctttaaaacccaaaaaaaaaaaaaaaaaaaaaaaaaaa

SEQ ID NO: 110 - protein, 827 aa, Cucurbita maxima
MSSSSSLSLSRHCLSSSFSFRLPNLFPPPAPGGCSLRVKDKGAVLESSIRCIIKCNAISKPPTQDYSDVLQSGVPLLKWQQFVEEGIESETAAQVSVWEEIEERVKWIKSMLSSMDDGDISISAYDTAWVALIPKVTEEGVKSPQFPSSLEWIANNQLPDGSWGDAQIFSPHDRIINTLASLVALKSWNLHPQNTRKGVAFFNQNIWKLEEENAEHMPIGFEIAFPSLLEFAKKLKLGIRSDSPALQQINARRRLKLARIPKDIMHKLPTTLLHSLEGMSGLDWEKLLKLQSQDGSFLSSPASTAFALMHTNHPNCFKYLEASVHRFNGGVPNVYPVDLFEHIWAVDRLQRLGISRFFHPHIVECVNNVRTHWSEKGICWARNSEFRDIDDTAMGFRLLRLYGHDVSAEVFKHFEKDGEFVCIAGQSTQAVTGMLNLYRASDQVMFPGEKILEDAKQFASKFLRQKQAANQLLDKWIIAKDLPGEVGYALDVPWFASLPRVETRLYIQHYGGKNDVWIGKTLYRMFKVNNDTYLELAKLDYNNCQRLHQIEWVDIQKWYTESKLRDYGMRRSSILFSYFGAVCSIFEPERAKERLAWTKTAALVHTIASHYKDANAHQRRAFLQQFTNFHAAQPYDNNAWRSGNMQQKGGEGLVGILLRTLTNISLDILLSHGVDITHHLHQAWQKWVFKWQEDGDVHKEEAELLVQTIILNSGCSTLEDLLSNSQFQKLSNLTNKVCHQLAHFKKHKVNNGNLYKEKTDNKMPPEIEEDIRKLVQLVIQKSSDGNDIDSPIKQTFLTVAKSVYYAAYFDAWTINYHIAKVLFERVF

SEQ ID NO: 111 - DNA, 2978 bp, Cucurbita maxima
atgaaagctctctctctctctcgcccttttccttgctcctccgatgccaccaagctctcctcccggccgccaccaccgccgccggtaggtagctgttcattcaaggttgaatccatcaggagtagcagaatcatcaaatgcaatgctatttctaagcctccaactcaagagtacagcgatgtgcttcaaagcggcgtgccagttataaagtggcagcagtttgtggaagatgacatagaatcagaaactaccgcacacgtgttgatttctaaagagatagaggagagagtgaaccggataaagtcaatgctgagctcgatggacgacggtgacataagcatctcggcttatgacacggcctgggtggcgctaataccgagagttcttgatggtgttaagactccgttgttcccttcttcgcttgaatggatagcacagaatcaactccctgatgggtcgtggggcgacagtggaatattctcagctcatgatcgaattctcagtaccttggcttgtgttttggcgttgaattcatggaagctccaccctgacaagtctgagaaaggcatggttttcttaaacaaaaacatttccaagctggaagatgagaacgccgagcacatgctgattgggtttgaggttgccttcccgtcgttgatggagtttgctaaaaggttgaacctccaagtccccacggactcgccggtgctgcaagagattaaccacagaaggagcataaagttaacaaggataccaaaggaaataatgcataaagtgcccactacgttattgcatagtttggaagggatggaaggcatggagggtttggattggggaatgcttctgaaattgcaggctccagatgggtctttcttgaaatctcctgcttccactgcctttgcattcatgaaaaccaataactcaaattgcttcaaatatttggaatcggttgtcagccgctttaatggcggagtacccaatgtgtaccccgtggatttgttcgaacatatttgggctgtggatagattacaacgacttggggtttcaagattttttcacccagaaatcgttgagtctgtggattatttgcggagacattggactgataaagggatatgttgggcaagagatgtggagttttatgatatcgacgacaccgccatgggattcaaacttctccggctgttcggccacgaagtttctgcagaggtgttcaagaatttcgagaaagatggggagttcgtgtgcatagcggggcaatcgacgcaggcggtgaccgggatgttcaacctgtaccgggcttccgatcaggtaatgttcccgggggagaaaattctggaggatgcaaagcaattttcctacaaattcctcagagagaaacaggctgctgatgagcttttggacaagtggatcatcaccaaggacttgcctggagaggttggttatgctcttgatgttccatggtttgcgagtttacctcgggtcgagactcgttacttcatagaacagtatggtggggaaaatgatatttggataggcaaaactctctacaggatgttcaaggtaaacaatgacacatacttggagcttgcaaaattggactacaacaaatgccaactattgcatcagaatgagtgggttgatattcaaaaatggtacacagagaacaatctgagagattatggaatgagaagaaccagccttttgttctcatattttggtgcagcgtgtagcattttcgaaccagagagggctaaggagaggcttgcatggaccaaaacggctgcgttggtcggagccattgagtcccatttcaaggacgccaatgctgaccaacgacgagccttcatccaacaattcataaacttcgatgcaatagatcaagcctacgatactaatgcgtggagggcaggcaatgtgcagcaaaagggaggaggacaaggactagttgggattttgcttcgaactctaacgagtatctcgttggatatattggtgtcgcatggtttcgacatcacccaccatttgcatcaagcttgggagaaatggctgtttaagtggcaagaagatggagatgtgcacaaggaagaggcagagttattggtgggaacaataattctcaactcaggctgttcaactttggaggatctgttgtccaatcctcaatatcagaagctttcctacctcacaaacaaagtgtgccatcaactaggtcactttaaaaagcacaaggtaacgaacggtgggatttataaggagaaaacagagaacaaaatgcccccagagatagaagaagacatgaggaaactattgcagatggtgatccaaaactcctcagatggcaatgacattgactcaccaatcaagaacacatttctaacggtagcaaaaagttcgtactatgcagcctatttcgatccttggactatcaactaccacattgccaaggtcctatttgaaagagtcttctaatcctagctagctagccacacagcacagccatgttgtattgtcaatttttgtatatccttcaccacatggaatacaaaaaaggggtttcagtatcgctacactcaggaaggcgcctactctgttcttcacggaaaatgccgaagcaaattaacgagatcaaagatttccttctcactgccagaaggaaggatgctcgctctgtgaaaatcaagagaagcaaagatgtggtcaagttcaaagttcgatgctccaagtatctttatactctttgtgttttcgactccgagaaggcagagaagttgaagcagtctcttccaccaggtttgagtgtgcaagatctgtgaaaatatgttgggttagagcctgacagcaagaagaggaccaaagtttttgttttagttgaagtttttttgtccaagtatttagggaaatacatacattttaaagtggattgagtttattatgcaattcccagttgatgtttcagtaaaaaaaaaaaaaaaaaa

SEQ ID NO: 112 - protein, 823 aa, Cucurbita maxima
MKALSLSRPFPCSSDATKLSSRPPPPPPVGSCSFKVESIRSSRIIKCNAISKPPTQEYSDVLQSGVPVIKWQQFVEDDIESETTAHVLISKEIEERVNRIKSMLSSMDDGDISISAYDTAWVALIPRVLDGVKTPLFPSSLEWIAQNQLPDGSWGDSGIFSAHDRILSTLACVLALNSWKLHPDKSEKGMVFLNKNISKLEDENAEHMLIGFEVAFPSLMEFAKRLNLQVPTDSPVLQEINHRRSIKLTRIPKEIMHKVPTTLLHSLEGMEGMEGLDWGMLLKLQAPDGSFLKSPASTAFAFMKTNNSNCFKYLESVVSRFNGGVPNVYPVDLFEHIWAVDRLQRLGVSRFFHPEIVESVDYLRRHWTDKGICWARDVEFYDIDDTAMGFKLLRLFGHEVSAEVFKNFEKDGEFVCIAGQSTQAVTGMFNLYRASDQVMFPGEKILEDAKQFSYKFLREKQAADELLDKWIITKDLPGEVGYALDVPWFASLPRVETRYFIEQYGGENDIWIGKTLYRMFKVNNDTYLELAKLDYNKCQLLHQNEWVDIQKWYTENNLRDYGMRRTSLLFSYFGAACSIFEPERAKERLAWTKTAALVGAIESHFKDANADQRRAFIQQFINFDAIDQAYDTNAWRAGNVQQKGGGQGLVGILLRTLTSISLDILVSHGFDITHHLHQAWEKWLFKWQEDGDVHKEEAELLVGTIILNSGCSTLEDLLSNPQYQKLSYLTNKVCHQLGHFKKHKVTNGGIYKEKTENKMPPEIEEDMRKLLQMVIQNSSDGNDIDSPIKNTFLTVAKSSYYAAYFDPWTINYHIAKVLFERVF

SEQ ID NO: 113 - DNA, 2602 bp, Pisum sativum
atcacacatcactctaaaactaaacattacttacttctttccatcatcaccatgtttactcacttctccacccactttcatcttccatcttcttcttctctcttctttcttcatccattctacaaatcctcttctttaggtgctgtgtcgtttgtggctaaagacaaagagaaaagatgtagagctatatccaaatcaagaactcaggaatatgaaggagtatttcaaactaatgtagcaacattaaagttgagtgaaattaatgtggaagatgtcatagtcatagatgatgaagaggagcaagatattagggtgggtttagtgaacaaaataaaatcaatattgagttcattggaagatggagagataactatatctgcttatgatactgcttgggttgctcttgttgaagatgttaatgctattagcacccctcaatttccttctagtctagagtggattgcaaaaaatcaacttcaagatggttcatggggtgatagccgattattctcggctcatgatcgaattatcaatacattggcatgtgtaatcgcgttacgatcatggaatatgcattcagaaaagtgtgacaaaggaatgatattttttagagagaatcttagcaagcttgagaatgagaatgaggagcatatgccaattgggtttgaagttgctttcccttcactacttgaaggagctagagggattaaaccattgatgtgcccaaatgattctccaatattgaaaaacatatttgaaaagagagatgaaaaactcacaagaataccaaaagagataatgcataaagtgccaacaacattgttgcatagcttggagggtatgtctggcttggattggaaacaacttctaaaattgcaatcacaagatggatcattcttgttttctccatcttccacagcttttgcattaatgcaaactaaagatggaaattgcctaaaatacttgaataatgttgtcaaaaaattcaatggaggagtcccaaatgtgtatccggtggatttatttgaacatatttgggtggttgatcgtctcgaacgccttggaatatctcgattttttcgacatgagatcaaagattgtatgaattatgtgtctaagatatggagtgaaaaaggaatttgttgggcaagaaattcaaatgttcaagatattgatgacacagcaatggctttcagattacttagattacatggtcaccaagtttcagcccatgtgtttaagcactttgagagaaatggtgaattcttctgctttgctggtcaatgcacacaagcagtgacaggaatgtataatctatttagagccagtcaagtgctttttccaggagagaaaattcttgaacatgccaaacacttttctgccaaagttttgaaggaaaagagagaagcaaatgaactcatagataagtggatcataatgaagaatctgcctgaagaggttggttatgcattggacatgccatggtatgcaaatttagatcgcattgagacaagattttacattgatcaatatggtgctgaaagcgatgtatggattggcaaaactctttacaggatggcgtatgtgaacaacaacaattatctcgagcttgctaaattagactacaacaattgtcaagcacaacatttaatcgaatggaatgtaattcaaacatggtacttagaatctagattgggcgaatttggattgagcaaaagggatcttttattggcttattttttggccaccgggagcatatttgagcctgaaagatctcatgagagacttgcttgggcaaaaactacggctctccttgagacaatcaagtgttatgttaggaatgaagatttgaggaaagattttgcgaaaaaattcaatgaccacatcgatgttcgagactattctattgcccggaggatgaagaggaacaaaacagaacatgaacttgttgagagtctgtttgcaaccataggtgaaatatcatgggatgtaagattgtcttatggtcatgaaattggatatgatatgcatcaatgttggaaaaagtggctttcaagttggcaaagtgaaggagacaaatgtgaaggagaagcagaacttttgatacaaataataaacctatgttctaaccattggatttctgagggaccaagtatgcaatccacaatacagcatcttcttcaactcactaactctatatgccataaacttagttgctatcaaaaggacaaggaattaaaaggcatcagctgccaggaaaacatcaccaactcagaagtagagtccaaaatgcaagaacttgtacaaatggtgtttcaaaaatgtcctaatgacattgattttaatgtcaagaatactttcttcacaattgcaaagtccttttactatgcagctttctgtgattcaaggaccatcaactttcatattgcaaaagttctctttgaaaaagttgtttaatcaaatttattgatttgtataggtattagttcactttcattcatgtgaatatatattttccctttaatgtaatattgaaacaaaaaggaaaatatttgttattgtgattcaatgtgtatatattgtcgttttctaataaatttca

SEQ ID NO: 114 - protein, 801 aa, Pisum sativum
MFTHFSTHFHLPSSSSLFFLHPFYKSSSLGAVSFVAKDKEKRCRAISKSRTQEYEGVFQTNVATLKLSEINVEDVIVIDDEEEQDIRVGLVNKIKSILSSLEDGEITISAYDTAWVALVEDVNAISTPQFPSSLEWIAKNQLQDGSWGDSRLFSAHDRIINTLACVIALRSWNMHSEKCDKGMIFFRENLSKLENENEEHMPIGFEVAFPSLLEGARGIKPLMCPNDSPILKNIFEKRDEKLTRIPKEIMHKVPTTLLHSLEGMSGLDWKQLLKLQSQDGSFLFSPSSTAFALMQTKDGNCLKYLNNVVKKFNGGVPNVYPVDLFEHIWVVDRLERLGISRFFRHEIKDCMNYVSKIWSEKGICWARNSNVQDIDDTAMAFRLLRLHGHQVSAHVFKHFERNGEFFCFAGQCTQAVTGMYNLFRASQVLFPGEKILEHAKHFSAKVLKEKREANELIDKWIIMKNLPEEVGYALDMPWYANLDRIETRFYIDQYGAESDVWIGKTLYRMAYVNNNNYLELAKLDYNNCQAQHLIEWNVIQTWYLESRLGEFGLSKRDLLLAYFLATGSIFEPERSHERLAWAKTTALLETIKCYVRNEDLRKDFAKKFNDHIDVRDYSIARRMKRNKTEHELVESLFATIGEISWDVRLSYGHEIGYDMHQCWKKWLSSWQSEGDKCEGEAELLIQIINLCSNHWISEGPSMQSTIQHLLQLTNSICHKLSCYQKDKELKGISCQENITNSEVESKMQELVQMVFQKCPNDIDFNVKNTFFTIAKSFYYAAFCDSRTINFHIAKVLFEKVV

SEQ ID NO: 115 - DNA, 2590 bp, Stevia rebaudiana
gcaaaacaaatccctctgatcctttcaccatgaagaccggcttcatctctcccgccaccgtcttccaccaccgtatttctccggcaaccaccttccgccaccacctttctccggcgaccaccaactccactggaattgtagctcttagagacatcaacttccggtgtaaagcggtatccaaagagtactctgatttactacaaaaagatgaggcttcatttaccaagtgggacgatgacaaagtgaaggaccatttggacacaaataagaatttgtatccaaacgatgagatcaaggagtttgttgagagcgtgaaagcaatgtttggttctatgaatgacggagaaataaatgtgtcagcgtatgatacggcttgggttgcactcgtgcaagatgttgatggaagtggttcccctcaatttccatcaagtttggagtggatcgcgaacaatcaactctcagatgggtcttggggcgatcatttgttattttcggctcatgataggatcattaacacgttggcatgtgttatagcgcttacttcttggaacgtccatccaagtaaatgtgaaaaaggactgaattttcttagagaaaacatatgtaaactcgaagacgagaacgcggaacatatgccaattggttttgaagtcacgttcccgtcgctaatagatatcgcaaagaagctaaatattgaagttcctgaggatactcctgccttaaaagaaatttatgcaagaagagacataaaactcacaaagataccaatggaagtattgcacaaagtgcccacaactttacttcatagtttggaaggaatgccagatttggaatgggaaaaacttctgaaattgcaatgcaaagatggatcatttctgttttctccatcatctactgcttttgcactcatgcaaacaaaagatgaaaagtgtcttcagtatttgacaaatattgttaccaaattcaatggtggagttccgaatgtgtacccggtggatctattcgaacatatttgggtagttgatcgacttcaacgacttgggattgctcgttatttcaaatcagagatcaaagattgcgttgaatatattaacaagtattggacaaagaatgggatttgttgggcaagaaacacgcacgtacaagatattgatgataccgcaatgggatttagggttttaagagcacatggttatgatgttactccagatgtatttcgacaatttgagaaggatggtaaattcgtatgtttcgctggacagtcaacacaagccgtcaccggaatgttcaatgtgtatagagcgtcacaaatgctctttcccggagaaagaattcttgaagatgcaaagaaattttcatataattatttgaaagaaaaacaatcgacaaatgagcttcttgataaatggatcatcgccaaagacttacctggagaggttggatatgcgctagacataccatggtatgcaagcttaccgcgactcgagacaagatattacttagagcaatacgggggcgaggatgatgtttggattggaaaaactctatacaggatgggatatgtgagcaataatacgtaccttgaaatggccaaattggactacaataactatgtggccgtgcttcaactcgaatggtacactatccagcaatggtatgttgatatcggtatcgaaaagtttgaaagtgacaatatcaaaagcgtattagtgtcgtattacttggctgcagccagcatattcgagccggaaaggtccaaggaacgaatcgcgtgggctaaaaccaccatattagttgacaagatcacctcaatttttgattcatcacaatcctcaaaagaggacataacagcctttatagacaaatttaggaacaaatcgtcttctaagaagcattcaataaatggagaaccatggcacgaggtgatggttgcactgaaaaagaccctacacggcttcgctttggatgcactcatgactcatagtcaagacatccacccgcaactccatcaagcttgggagatgtggttgacgaaattgcaagatggagtagatgtgacagcggaattaatggtacaaatgataaatatgacagctggtcgttgggtatccaaagaacttttaactcatcctcaataccaacgcctctcaaccgtcacaaatagtgtgtgtcacgatataactaagctccataacttcaaggagaattccacgacggtagactcgaaagttcaagaactagtgcaacttgtgtttagcgacacgcccgatgatcttgatcaggatatgaaacagacgtttctaaccgtcatgaaaaccttctactacaaggcgtggtgtgatccgaacacgataaatgaccatatctccaaggtgttcgagattgtaatatgaaaacagctaattataatatggttgagtaagtgttgaatggtaatttagatatcccaatgtccatcttgagttagattattcaatgttttaataaccgggtcgggttgtgtgaccgtcggaccagtttcaaaagcatatattagaattttgatgataggtgtgtaattgttaaatattaataaattgtgtctttaact

SEQ ID NO: 116 - protein, 787 aa, Stevia rebaudiana
MKTGFISPATVFHHRISPATTFRHHLSPATTNSTGIVALRDINFRCKAVSKEYSDLLQKDEASFTKWDDDKVKDHLDTNKNLYPNDEIKEFVESVKAMFGSMNDGEINVSAYDTAWVALVQDVDGSGSPQFPSSLEWIANNQLSDGSWGDHLLFSAHDRIINTLACVIALTSWNVHPSKCEKGLNFLRENICKLEDENAEHMPIGFEVTFPSLIDIAKKLNIEVPEDTPALKEIYARRDIKLTKIPMEVLHKVPTTLLHSLEGMPDLEWEKLLKLQCKDGSFLFSPSSTAFALMQTKDEKCLQYLTNIVTKFNGGVPNVYPVDLFEHIWVVDRLQRLGIARYFKSEIKDCVEYINKYWTKNGICWARNTHVQDIDDTAMGFRVLRAHGYDVTPDVFRQFEKDGKFVCFAGQSTQAVTGMFNVYRASQMLFPGERILEDAKKFSYNYLKEKQSTNELLDKWIIAKDLPGEVGYALDIPWYASLPRLETRYYLEQYGGEDDVWIGKTLYRMGYVSNNTYLEMAKLDYNNYVAVLQLEWYTIQQWYVDIGIEKFESDNIKSVLVSYYLAAASIFEPERSKERIAWAKTTILVDKITSIFDSSQSSKEDITAFIDKFRNKSSSKKHSINGEPWHEVMVALKKTLHGFALDALMTHSQDIHPQLHQAWEMWLTKLQDGVDVTAELMVQMINMTAGRWVSKELLTHPQYQRLSTVTNSVCHDITKLHNFKENSTTVDSKVQELVQLVFSDTPDDLDQDMKQTFLTVMKTFYYKAWCDPNTINDHISKVFEIVI

SEQ ID NO: 117 - DNA, 2010 bp, Zea mays
aacgatcgaggccagcagctggggctggacttggatagctagatggccaagccactgaacctgactcctgccttcctctcgccgatgatggccaccagctgccgcttcagctccggcgggcatgcgcagtgcttcccctcgtcgctaccgtgccggaggaggacgccgacgccacggaccacatcgtcgtctacgcgccctgcggctcaggttagccctggcagaagcaagcaacacgatgaagcagcatcggagactacgataaggcagcagctccagcaagtcgatgtgcttgagaacatggggatttctcggcattttgctggtgaaatcaagtgtatccttgacaggacatacagatgttggttacagagacacgaggaaattatgcaggacacaacgacatgtgcgatggcatttcgtattctaaggatgaatggatatgatgtctcatgtgatctgttgtatcatgttgctgaaacatccgggatccatgatccacttaggggacatttgaatgacacaagaaccttgttagaattacacaaggcctctacagttagtatctctgaagacgagtctatcctagatagcataggcttaaggtcaagtaccttactaagagaacaaatggagtctagtggtgctctacgaaatcctccactatttagagaggtggaacatgctctctaccatcccttctacgccacattggaccgtctaacccacaagtggaacattgaaaatttcaatactacagagcaccagatgcaagacacaccatacttgtccagtcgatataccagtagagatattctagccttgggtatcagagacttcaattcctctcaacttacttaccagcaagaacttcaacatcttgaaagttgggtgaaagaatgcaggttggaccaactaccatttgtgcgacaaaatttggcatacttcttattgtccgctgctggctgcatgtactgccctgaactgtctgaagctcgcactttgtgtgcaaaaaatggtgcgctcataactattgttgatgacttctttgatgttggaggatcaaaagaagaacttgaaaaccttgtcatgttggttgagctgtgggacgagcatcacaaaattgagttttactcagaacatgtagagattatattttcttcaatttacaactcagttaaccagtacggtgcaaaggcttctttgttacaagaccgcaatgttaccaaacacctagtacaaatatggttggatttgctaaagtctatgatgacagaggtagagtggcgtttgagcaaatatgtgccaacagaggaggaatacatgacaaatgcatatttaacatttgcattgggtcccattgtattgccagcgttgtattttgttggaccaaagatcccggagtctattgttaaagatccagaatatgacgagttgttcaagctaatgagcacatgtggtcgactcttgaatgatgttcagagtttcgagagggagcacaaggagggcaagctgaacattgtttctctcctcgttcttcatggtggctccacgtccatatcagatgccagaaagaaattacagaagcccatagacacatgtaggagagacctcctgagactagttcttcgtgaagaaagtgttgttcctaggccatgcaaggaattattctggaaaatgtgcaaggtctgctacttcttttactcgagaattgatgggtttagatcaccagtggagagggccaaagaagtgaatgcagtgatcaatgagccactaaagctacaagaaaaccatacacacatgtctgttttgtgagaggaaccaaatgtcgatgtgacgttttcatttgatttagtaggtgtgctttctatataagatagttcgctaggtgactgcatcaggtggtgcgtaaaaacttagcacattggtaatgtataggagttggcccatatgtatgtttgattgtggttggtgagtttagtattattttgaaatttaaaaaaaaaaaaa

SEQ ID NO: 118 - protein, 590 aa, Zea mays
MAKPLNLTPAFLSPMMATSCRFSSGGHAQCFPSSLPCRRRTPTPRTTSSSTRPAAQVSPGRSKQHDEAASETTIRQQLQQVDVLENMGISRHFAGEIKCILDRTYRCWLQRHEEIMQDTTTCAMAFRILRMNGYDVSCDLLYHVAETSGIHDPLRGHLNDTRTLLELHKASTVSISEDESILDSIGLRSSTLLREQMESSGALRNPPLFREVEHALYHPFYATLDRLTHKWNIENFNTTEHQMQDTPYLSSRYTSRDILALGIRDFNSSQLTYQQELQHLESWVKECRLDQLPFVRQNLAYFLLSAAGCMYCPELSEARTLCAKNGALITIVDDFFDVGGSKEELENLVMLVELWDEHHKIEFYSEHVEIIFSSIYNSVNQYGAKASLLQDRNVTKHLVQIWLDLLKSMMTEVEWRLSKYVPTEEEYMTNAYLTFALGPIVLPALYFVGPKIPESIVKDPEYDELFKLMSTCGRLLNDVQSFEREHKEGKLNIVSLLVLHGGSTSISDARKKLQKPIDTCRRDLLRLVLREESVVPRPCKELFWKMCKVCYFFYSRIDGFRSPVERAKEVNAVINEPLKLQENHTHMSVL

SEQ ID NO: 119 - DNA, 543 bp, Nicotiana sylvestris
tatgatacggcttgggtggctatgataccttcaagaaattctgtaaaccagccatgttttcctcagtgtttggattggattcttgaaaatcaaagagaagatggatcttggggattaagtcctagccactcattgcttgtcaaggactcactttcttctactttagcatgtttgcttgcccttagcaaatggggagttggagataaccaagtccaacgaggccttatctttattaaaaagcatggttgggcagttgataacaaggatcagatatcacctgttggatttaggattttatttcccagtatgatcaaatatgcagaaaaaatgaacttaaatctgcctttgggtcctgacattgtaaatctagcgattagcaaccgagatttagcaattgaaagagcgttacagagtgatttcaaggggaatgtttcaaatcttgaatatatggctgaaggacttggtgaattatgtcaatggaaggaactaatggtacatcaaagagaaaatggatcactatttgattcaccagcagccacagcc

SEQ ID NO: 120 - protein, 181 aa, Nicotiana sylvestris
YDTAWVAMIPSRNSVNQPCFPQCLDWILENQREDGSWGLSPSHSLLVKDSLSSTLACLLALSKWGVGDNQVQRGLIFIKKHGWAVDNKDQISPVGFRILFPSMIKYAEKMNLNLPLGPDIVNLAISNRDLAIERALQSDFKGNVSNLEYMAEGLGELCQWKELMVHQRENGSLFDSPAATA

SEQ ID NO: 121 - DNA, 2576 bp, Arabidopsis thaliana
cgtcagtcgtcaaggctaattcgtcgcgagttgctacgacgccgtttcggttgcttctggtttctttatgtctatcaaccttcgctcctccggttgttcgtctccgatctcagctactttggaacggagattggactcagaagtacagacaagagctaacaatgtgagctttgagcaaacaaaggagaagattaggaagatgttggagaaagtggagctttctgtttcggcctacgatactagttgggtagcaatggttccatcaccgagctcccaaaatgctccacttttcccacagtgtgtgaaatggttattggataatcaacatgaagatggatcttggggacttgataaccatgaccatcaatctcttaagaaggatgtgttatcatctacactggctagtatcctcgcgttaaagaagtggggaattggtgaaagacaaataaacaagggtctccagtttattgagctgaattctgcattagtcactgatgaaaccatacagaaaccaacagggtttgatattatatttcctgggatgattaaatatgctagagatttgaatctgacgattccattgggctcagaagtggtggatgacatgatacgaaaaagagatctggatcttaaatgtgatagtgaaaagttttcaaagggaagagaagcatatctggcctatgttttagaggggacaagaaacctaaaagattgggatttgatagtcaaatatcaaaggaaaaatgggtcactgtttgattctccagccacaacagcagctgcttttactcagtttgggaatgatggttgtctccgttatctctgttctctccttcagaaattcgaggctgcagttccttcagtttatccatttgatcaatatgcacgccttagtataattgtcactcttgaaagcttaggaattgatagagatttcaaaaccgaaatcaaaagcatattggatgaaacctatagatattggcttcgtggggatgaagaaatatgtttggacttggccacttgtgctttggcttttcgattattgcttgctcatggctatgatgtgtcttacgatccgctaaaaccatttgcagaagaatctggtttctctgatactttggaaggatatgttaagaatacgttttctgtgttagaattatttaaggctgctcaaagttatccacatgaatcagctttgaagaagcagtgttgttggactaaacaatatctggagatggaattgtccagctgggttaagacctctgttcgagataaatacctcaagaaagaggtcgaggatgctcttgcttttccctcctatgcaagcctagaaagatcagatcacaggagaaaaatactcaatggttctgctgtggaaaacaccagagttacaaaaacctcatatcgtttgcacaatatttgcacctctgatatcctgaagttagctgtggatgacttcaatttctgccagtccatacaccgtgaagaaatggaacgtcttgataggtggattgtggagaatagattgcaggaactgaaatttgccagacagaagctggcttactgttatttctctggggctgcaactttattttctcctgaactatctgatgctcgtatatcgtgggccaaaggtggagtacttacaacggttgtagacgacttctttgatgttggagggtccaaagaagaactggaaaacctcatacacttggtcgaaaagtgggatttgaacggtgttcctgagtacagctcagaacatgttgagatcatattctcagttctaagggacaccattctcgaaacaggagacaaagcattcacctatcaaggacgcaatgtgacacaccacattgtgaaaatttggttggatctgctcaagtctatgttgagagaagccgagtggtccagtgacaagtcaacaccaagcttggaggattacatggaaaatgcgtacatatcatttgcattaggaccaattgtcctcccagctacctatctgatcggacctccacttccagagaagacagtcgatagccaccaatataatcagctctacaagctcgtgagcactatgggtcgtcttctaaatgacatacaaggttttaagagagaaagcgcggaagggaagctgaatgcggtttcattgcacatgaaacacgagagagacaatcgcagcaaagaagtgatcatagaatcgatgaaaggtttagcagagagaaagagggaagaattgcataagctagttttggaggagaaaggaagtgtggttccaagggaatgcaaagaagcgttcttgaaaatgagcaaagtgttgaacttattttacaggaaggacgatggattcacatcaaatgatctgatgagtcttgttaaatcagtgatctacgagcctgttagcttacaggaagaatctttaacttgatccaagttgatctggcaggtaaactcagtaaatgaaaataagactttggtcttcttctttgttgcttcagaacaagaagaggtttgtttaatttagaaaaacaaaggctgtttcttttcattcatttatattgagttcttttcaaaatttc

SEQ ID NO: 122 - protein, 785 aa, Arabidopsis thaliana
MSINLRSSGCSSPISATLERRLDSEVQTRANNVSFEQTKEKIRKMLEKVELSVSAYDTSWVAMVPSPSSQNAPLFPQCVKWLLDNQHEDGSWGLDNHDHQSLKKDVLSSTLASILALKKWGIGERQINKGLQFIELNSALVTDETIQKPTGFDIIFPGMIKYARDLNLTIPLGSEVVDDMIRKRDLDLKCDSEKFSKGREAYLAYVLEGTRNLKDWDLIVKYQRKNGSLFDSPATTAAAFTQFGNDGCLRYLCSLLQKFEAAVPSVYPFDQYARLSIIVTLESLGIDRDFKTEIKSILDETYRYWLRGDEEICLDLATCALAFRLLLAHGYDVSYDPLKPFAEESGFSDTLEGYVKNTFSVLELFKAAQSYPHESALKKQCCWTKQYLEMELSSWVKTSVRDKYLKKEVEDALAFPSYASLERSDHRRKILNGSAVENTRVTKTSYRLHNICTSDILKLAVDDFNFCQSIHREEMERLDRWIVENRLQELKFARQKLAYCYFSGAATLFSPELSDARISWAKGGVLTTVVDDFFDVGGSKEELENLIHLVEKWDLNGVPEYSSEHVEIIFSVLRDTILETGDKAFTYQGRNVTHHIVKIWLDLLKSMLREAEWSSDKSTPSLEDYMENAYISFALGPIVLPATYLIGPPLPEKTVDSHQYNQLYKLVSTMGRLLNDIQGFKRESAEGKLNAVSLHMKHERDNRSKEVIIESMKGLAERKREELHKLVLEEKGSVVPRECKEAFLKMSKVLNLFYRKDDGFTSNDLMSLVKSVIYEPVSLQEESLT

SEQ ID NO: 123 - DNA, 3460 bp, Zea mays; identical to SEQ ID NO: 93

SEQ ID NO: 124 - protein, 827 aa, Zea mays; identical to SEQ ID NO: 94

SEQ ID NO: 125 - DNA, 1773 bp, Zea mays
atggccatgccagtgaagctgactcctgcctccctctcgctgaaggcggtctgctgccgcttcagctccggagggcatgcgctgcgcttcggctcgtcgctaccgtgctggaggaggacgccgacgcaacggagcacgtcgtcgtctacgacgcgccctgcggctgaggttagctctggcaaaagcaagcagcacgatcaagaagcatcggaggctacgataagacagcagctccagctagtcgatgtgcttgagaacatggggatttctcggcattttgctgctgaaatcaaatgcatccttgacaggacatacagaagttggttacagagacatgaggaaattatgctggacacaatgacctgtgcgatggcatttcgtattctaaggttgaatggatacaatgtctcttctgatgagttgtatcatgttgttgaagcttccggactccataattcacttggaggatatctcaatgatacaagaaccttgttagaattacacaaggcctcgacagttagtatctctgaagatgagtctatcctggatagcataggctcaaggtcacgtaccttactgagggaacaactagagtctggtggtgctctacgaaaaccttcactctttaaagaggtggaacatgctctggacggtcccttctacaccacattggaccgtctacaccataggtggaacatcgaaaatttcaatattatagagcagcacatgctagagacaccatacttgtcaaatcaacataccagtagagatattctagcgttgagtattagagacttcagttcctctcagtttacttaccagcaagaacttcaacatcttgaaagctgggtgaaagagtgcaggttagaccagctacaatttgcgcgacagaagttggcatacttctacttgtctgctgctggcaccatgttctctcctgagctgtctgatgctcgaactttgtgggccaaaaatggtgtgctcacaactattgttgacgacttctttgatgttgcgggatcaaaagaagaacttgaaaaccttgtcatgttggttgagatgtgggacgagcatcacaaagttgagttctactcagaacaagtagagattatattttcttcaatttatgactcagttaaccaacttggtgaaaaggcttctttggtacaagaccgcagtattaccaaacacctagtagaaatatggttggatttgctaaagtctatgatgacagaggtagagtggcgtttgagcaaatatgtgccaacagagaaggaatacatgataaatgcatctttaatatttggactaggccccattgtattgccagcattatattttgttgggccaaagatctcagagtctattgttaaagatccagaatatgatgaattgttcaaactgatgagcacatgtggtcgcctcttgaatgatgttcagacttttgagagggagtacaacgagggcaagttgaatagtgtttctctcctcgttcttcatggtggccccatgtccatatcagacgccaaaaggaaattacagaagcccatagacacatgcagaagagacctcctaagtttagttcttcgtgaagaaagtgttgttcctaggccctgcaaggaattattttggaaaatgtgcaaggtgtgctacttcttctactcgacgacggatgggtttagctcacaagtggagagggctaaagaagtggatgcggtgatcaatgagccactaaagctacaaggaagtcatacgctggtgtctgatgtgtga

SEQ ID NO: 126 - protein, 590 aa, Zea mays
MAMPVKLTPASLSLKAVCCRFSSGGHALRFGSSLPCWRRTPTQRSTSSSTTRPAAEVSSGKSKQHDQEASEATIRQQLQLVDVLENMGISRHFAAEIKCILDRTYRSWLQRHEEIMLDTMTCAMAFRILRLNGYNVSSDELYHVVEASGLHNSLGGYLNDTRTLLELHKASTVSISEDESILDSIGSRSRTLLREQLESGGALRKPSLFKEVEHALDGPFYTTLDRLHHRWNIENFNIIEQHMLETPYLSNQHTSRDILALSIRDFSSSQFTYQQELQHLESWVKECRLDQLQFARQKLAYFYLSAAGTMFSPELSDARTLWAKNGVLTTIVDDFFDVAGSKEELENLVMLVEMWDEHHKVEFYSEQVEIIFSSIYDSVNQLGEKASLVQDRSITKHLVEIWLDLLKSMMTEVEWRLSKYVPTEKEYMINASLIFGLGPIVLPALYFVGPKISESIVKDPEYDELFKLMSTCGRLLNDVQTFEREYNEGKLNSVSLLVLHGGPMSISDAKRKLQKPIDTCRRDLLSLVLREESVVPRPCKELFWKMCKVCYFFYSTTDGFSSQVERAKEVDAVINEPLKLQGSHTLVSDV

SEQ ID NO: 127 - DNA, 2658 bp, Unknown
  GenBank Accession No. E12936
gaaagcggtagttttcggctcttggctgtttttgtgtactgcctattctgttctttatatgcactgaatgtgaaaatgcctcaccagagtttgatgctgcttccgcaatttctttgcatgtcctaaacataccagtcatgtatctttcccgacctaccggcgttgcccgttttgctgcctcctcctcctcctcctcctcagcttccctattccctggagtggatgtggacacaacaactaaaactggagctttgcactttgaagaaacaaaagaaagaattaagaaattgttcgacaaggttgaactttcagtttctgcatatgatactgcatgggtggcaatggttccttctccaaactctctcaaccaacctcttttccccgagtgtataaactgggtattagatagtcaacatgctgatggctcatggggcctactccacaacgatcagttgctgatgaaggccaatctcttatctacattagcatgtgttcttactcttaagcggtggaatattgggcatgatcatatgagcaaggcccttgattttatcaagtctaatatagcttcagctactgatgagaaccaacgttctccggtgggatttgacattattttccctggcatgattgagtatgctaaagacttgaatttgaatctacccttggcaccgacgaacgtggatgccttggttcgaaagaaagagttggagctgagaagctgcagaagcaactctgaaggtggaaaagcctatttagcgtatgtttcagaaggaattggaaagttacaggactgggatatggtcatgcaatatcaaaggaagaatggatcactgtttaattctccatccactacggcagcggcttttatgcatagaaatgatgatggctgttttgattatcttcgctcactcttacaaaagtttgatggctcagttcccacaatatatcctcttgatatatatgctcgattacacatggttgatagccttcaaaaattcggaattgctcggcatttcaaagaggagattagaagcgtattagatgaaacttacaggtgttggatgcaaggagaggaaaatatattcttagatgcttcaacttgtgcaatggcctttcgaatgttacgtgttgaaggatatgatgtttcttcagaccagttgactcaattttcagaagatatctttcccaattgccttggaggatatttaaaagacttcggtgcctcgctggagttatataaggcctctcagattatcacgcaccccgatgaatctgttctggaaaatataaactcttggactagtcgtttcctgaagcatggattatctagtgattcagtttggtctgatagaaccgatagtgttgttaaacaagaggctgttaatgctcttgagttcccctataatgcaactctagaacgcctaataagtaagagggcaatggaaagttacagtggagacattgtgaggatttcaaaatcgccatatgcctgcttaaattttggccatcaagattttctggaacttgctgtagaggatttcaataccctgcaacgcattcatcttaaagaactggaagagcttcaaagatgggtggttgaaaacaaattggacgagttgaaatttttcagactgcacctagggtactgctattttgctgcggcagcgacccttactgatcctgaacttcatgatgctcgcatagcatgggcacaaaatggtgtgctcacgaccgtggttgatgatttctatgatggtggaggatctgaagaggaattggataaccttatagaattggtggaaaagtgggatcctgatggggaagtgggttactgttccaaggacgttgagattgtatttcttgcactgcacagcacagtttgtgaaataggaagaagagctttagtatggcaaggacgcagtgttatgaggaatgttatcgatggttggttggctctgctgaaggtgatgagaaaggaagctgaatggtcgacaaataaggtagtgccatcaatgggtgaatatatggaacaagcccatgtatcattcgcgttgggacctataatccttccaatgctcttctttgttggacctaaactctcagaggaaatgattggaagctgtgaataccagaagttatataagctgatgagcactgctggtcgccttaagaatgatattcgatcttacgatagagaatgcaaagagggaaagctgaatattctgtctctgtggatgattgatggcggtggtaatgtcaccaaagaggaggccattgaagcaattaaaggggattttgagagggcgataagagagctgctggggttagttttgcaggagaacactacaattccaagagcttgtaaggatttgttctggaaattgatgtccattgtgaatctattttacatggaagatgatgggtacacttcaaataggttgatgaacactgtaaaagccatgtttgaacaacccatggatctggatgcactattgaacaaatgaacgaacaacaaacgaaataagttgtagtgggaagcagacgccacctattcactgtcttctctactgatcagatgtctattgctttctcattgaggaaatggcaaataaaacattttatggaaacatttcattgttaaattgagacagtctg

SEQ ID NO: 128 - protein, 789 aa, Unknown
  polypeptide translated from GenBank Accession No. E12936
MYLSRPTGVARFAASSSSSSSASLFPGVDVDTTTKTGALHFEETKERIKKLFDKVELSVSAYDTAWVAMVPSPNSLNQPLFPECINWVLDSQHADGSWGLLHNDQLLMKANLLSTLACVLTLKRWNIGHDHMSKALDFIKSNIASATDENQRSPVGFDIIFPGMIEYAKDLNLNLPLAPTNVDALVRKKELELRSCRSNSEGGKAYLAYVSEGIGKLQDWDMVMQYQRKNGSLFNSPSTTAAAFMHRNDDGCFDYLRSLLQKFDGSVPTIYPLDIYARLHMVDSLQKFGIARHFKEEIRSVLDETYRCWMQGEENIFLDASTCAMAFRMLRVEGYDVSSDQLTQFSEDIFPNCLGGYLKDFGASLELYKASQIITHPDESVLENINSWTSRFLKHGLSSDSVWSDRTDSVVKQEAVNALEFPYNATLERLISKRAMESYSGDIVRISKSPYACLNFGHQDFLELAVEDFNTLQRIHLKELEELQRWVVENKLDELKFFRLHLGYCYFAAAATLTDPELHDARIAWAQNGVLTTVVDDFYDGGGSEEELDNLIELVEKWDPDGEVGYCSKDVEIVFLALHSTVCEIGRRALVWQGRSVMRNVIDGWLALLKVMRKEAEWSTNKVVPSMGEYMEQAHVSFALGPIILPMLFFVGPKLSEEMIGSCEYQKLYKLMSTAGRLKNDIRSYDRECKEGKLNILSLWMIDGGGNVTKEEAIEAIKGDFERAIRELLGLVLQENTTIPRACKDLFWKLMSIVNLFYMEDDGYTSNRLMNTVKAMFEQPMDLDALLNK

SEQ ID NO: 129 - DNA, 2283 bp, Oryza sativa japonica
atgcagcacaggaaggagctccaggcaaggacaagggaccagctccagacattggagttatctacgtctttgtacgacacggcgtgggtggccatggtgccactgcggggttcccgtcagcatccgtgtttcccacaatgcgtggagtggatattacaaaaccagcaggatgatggatcttggggtacaagaggattcggcgtggcggtcacaagagatgttctgtcgtctacgttggcgtgtgttcttgcactcaagagatggaatgttgggcaggagcacatcaggagaggactagattttattggaaggaatttctccattgccatggatgagcagattgctgctcctgttggtttcaacatcacttttcctggtatgcttagccttgccatggggatggatttagaattccctgtcagacagacggatgttgatagacttcttcacctccgggagatagaactggaaagagaggctggagaccattcttatggaagaaaggcatatatggcttatgtcacagaaggattaggaacccggttggagtgggatgagattatgatgttccagaggaagaatggatcatttttcaactgtccttccacaactgctgccacattagtcaaccactataacgataaagccctccagtacttaaattgtctggttagtaaatttggcagtgcagtaccaacagtgtatccactaaacatatattgtcagctttcatgggtggatgcacttgaaaagatgggaatttctcagtattttgtcagtgagataaagagcatcctagacacaacatacgtttcatggttagaaagagatgaggaaattatgctggacataacaacatgtgcaatggcttttcgcctgttaaggatgaatgggtatcatgtttcctcagtcgagttatctcctgttgctgaagcttccagtttccgtgaatcacttcaaggatatttaaatgataagaaatctctaatcgaattatacaaggcttcaaaagtcagtaaatcagaaaatgaatcaatcttagatagcataggctcttggtcaggtagcttattgaaggaaagtgtgtgctctaatggggtgaaaaaagctccaatctttgaagagatgaagtatgctcttaagtttcccttctacaccacactggaccgtctagatcacaagaggaacattgaacgttttgatgcaaaggattcccagatgttaaagacggaatacttgcttcctcatgccaatcaagatattctagctttggctggtgaagatttcagtagttctcaatctatataccaggatgaacttaattatcttgagtggtgggtgaaagatgaaaagctcgatcagctgccatttgcacgccagaagttgacatattgctacctttctgctgctgctaccatattcccccgtgaattgtctgaagcccgcattgcatgggctaaaaatggtgtactgacaactgttgttgatgacttctttgatcttgggggatcaaaagaagaacttgaaaacctccttgctttagttgagaagggggatggacatccagaggagttctactcagaaccaagaagaaaagttttttctgctatttatactacagggacccagcttggagcaaaggcttctgcattacaaggccgggatgttacaaaacgcctaacagaaatatggttatgtctgatgaggtctatgatgaccgaagctgaatggcagaggacaaaatatgtgccgacaatggaagaatatatggcaaatgctgttgtctcatttgcactgggacctattgtgctcccgactctgtatttcgtaggaccgaagctccaagaggatgtcgtcagggatcatgagtacaatgaattatttagactgatgagcacttgtgggcgtctcctgaatgacagccaaggctttgagagggagagcctggagggaaagctgaacagtgtctcactgcttgttcatcacagtggtggttctatctccatagacgaggctaaaatgaaagcccagaaatccatagacacttccaggaggaacttgttaagattggtccttggagaacagggtgctgttcctaggccatgcaagcagctgttctggaagatgtgcaagattgttcacatgttctactctcggactgatgggtttagctcgccgaaggaaatggttagtgcagtgaatgcagtcgtcaaggagccacttaaactcaaagtgagtgatccatatggctctattttgtcgggcaattgagtgcttctccgt

SEQ ID NO: 130 - protein, 756 aa, Oryza sativa japonica
MQHRKELQARTRDQLQTLELSTSLYDTAWVAMVPLRGSRQHPCFPQCVEWILQNQQDDGSWGTRGFGVAVTRDVLSSTLACVLALKRWNVGQEHIRRGLDFIGRNFSIAMDEQIAAPVGFNITFPGMLSLAMGMDLEFPVRQTDVDRLLHLREIELEREAGDHSYGRKAYMAYVTEGLGTRLEWDEIMMFQRKNGSFFNCPSTTAATLVNHYNDKALQYLNCLVSKFGSAVPTVYPLNIYCQLSWVDALEKMGISQYFVSEIKSILDTTYVSWLERDEEIMLDITTCAMAFRLLRMNGYHVSSVELSPVAEASSFRESLQGYLNDKKSLIELYKASKVSKSENESILDSIGSWSGSLLKESVCSNGVKKAPIFEEMKYALKFPFYTTLDRLDHKRNIERFDAKDSQMLKTEYLLPHANQDILALAGEDFSSSQSIYQDELNYLEWWVKDEKLDQLPFARQKLTYCYLSAAATIFPRELSEARIAWAKNGVLTTVVDDFFDLGGSKEELENLLALVEKGDGHPEEFYSEPRRKVFSAIYTTGTQLGAKASALQGRDVTKRLTEIWLCLMRSMMTEAEWQRTKYVPTMEEYMANAVVSFALGPIVLPTLYFVGPKLQEDVVRDHEYNELFRLMSTCGRLLNDSQGFERESLEGKLNSVSLLVHHSGGSISIDEAKMKAQKSIDTSRRNLLRLVLGEQGAVPRPCKQLFWKMCKIVHMFYSRTDGFSSPKEMVSAVNAVVKEPLKLKVSDPYGSILSGN

SEQ ID NO: 131 - DNA, 2283 bp, Oryza sativa japonica
atgcagcacaggaaggagctccaggcaaggacaagggaccagctccagacattggagttatctacgtctttgtacgacacggcgtgggtggccatggtgccactgcggggttcccgtcagcatccgtgtttcccacaatgcgtggagtggatattacaaaaccagcaggatgatggatcttggggtacaagaggattcggcgtggcggtcacaagagatgttctgtcgtctacgttggcgtgtgttcttgcactcaagagatggaatgttgggcaggagcacatcaggagaggactagattttattggaaggaatttctccattgccatggatgagcagattgctgctcctgttggtttcaacatcacttttcctggtatgcttagccttgccatggggatggatttagaattccctgtcagacagacggatgttgatagacttcttcacctccgggagatagaactggaaagagaggctggagaccattcttatggaagaaaggcatatatggcttatgtcacagaaggattaggaaacctgttggagtgggatgagattatgatgttccagaggaagaatggatcatttttcaactgtccttccacaactgctgccacattagtcaaccactataacgataaagccctccagtacttaaattgtctggttagtaaatttggcagtgcagtaccaacagtgtatccactaaacatatattgtcagctttcatgggtggatgcacttgaaaagatgggaatttctcagtattttgtcagtgagataaagagcatcctagacacaacatacgtttcatggttagaaagagatgaggaaattatgctggacataacaacatgtgcaatggcttttcgcctgttaaggatgaatgggtatcatgtttcctcagtcgagttatctcctgttgctgaagcttccagtttccgtgaatcacttcaaggatatttaaatgataagaaatctctaatcgaattatacaaggcttcaaaagtcagtaaatcagaaaatgaatcaatcttagatagcataggctcttggtcaggtagcttattgaaggaaagtgtgagctctaatggggtgaaaaaagctccaatctttgaagagatgaagtatgctcttaagtttcccttctacaccacactggaccgtctagatcacaagaggaacattgaacgttttgatgcaaaggattcccagatgttaaagacgggatacttgcttcctcatgccaatcaagatattctagctttggctgttgaagatttcagtagttctcaatctatataccaggatgaacttaattatcttgagtgttgggtgaaagatgaaaagctcgatcagctgccatctgcacgccagaagttgacatattgctacctttctgctgctgctaccatattcccccgtgaattgtctgaagcccgcattgcatgggctaaaaatggtgtactgacaactgttgttgatgacttctttgatcttgggggatcaaaagaagaactagaaaacctcattgctttagttgagaagtgggatggacatcaagaggagttctactcagaacaagtaagaatagttttttctgctatttatactacagggacccagcttggagcaaaggcttctgcattacaaggccgggatgttacaaaccccctaacagaaatatggttatgtctgatgaggtctatgatggccgaagctgaatggcagaggacaaaatatgtgccgacaatggaagaatatatggcaaatgctgttgtctcatttgcactgggacctattgtgctcccgactctgtatttcgtaggaccgaagctccaagaggatgtcgtcagggatcatgagtacaatgaattatttagactgatgagcacttgtgggcgtctcctgaatgacagccaaggctttgagagggagagcctggagggaaagctgaacagtgtctcactgcttgttcatcacagtggtggttctatctccatagacgaggctaaaatgaaagcccagaaatccatagacacttccaggaggaacttgttaagattggtccttggagaacagggtgctgttcctaggccatgcaagcagctgttctggaagatgtgcaagattgttcacatgttctactctcggactgatgggtttagctcgccgaaggaaatggttagtgcagtgaatgcagtcgtcaaggagccacttaaactcaaagtgagtgatccatatggctctattttgtcgggcaattgagtgcttctccgt

SEQ ID NO: 132 - protein, 756 aa, Oryza sativa japonica
MQHRKELQARTRDQLQTLELSTSLYDTAWVAMVPLRGSRQHPCFPQCVEWILQNQQDDGSWGTRGFGVAVTRDVLSSTLACVLALKRWNVGQEHIRRGLDFIGRNFSIAMDEQIAAPVGFNITFPGMLSLAMGMDLEFPVRQTDVDRLLHLREIELEREAGDHSYGRKAYMAYVTEGLGNLLEWDEIMMFQRKNGSFFNCPSTTAATLVNHYNDKALQYLNCLVSKFGSAVPTVYPLNIYCQLSWVDALEKMGISQYFVSEIKSILDTTYVSWLERDEEIMLDITTCAMAFRLLRMNGYHVSSVELSPVAEASSFRESLQGYLNDKKSLIELYKASKVSKSENESILDSIGSWSGSLLKESVSSNGVKKAPIFEEMKYALKFPFYTTLDRLDHKRNIERFDAKDSQMLKTGYLLPHANQDILALAVEDFSSSQSIYQDELNYLECWVKDEKLDQLPSARQKLTYCYLSAAATIFPRELSEARIAWAKNGVLTTVVDDFFDLGGSKEELENLIALVEKWDGHQEEFYSEQVRIVFSAIYTTGTQLGAKASALQGRDVTNPLTEIWLCLMRSMMAEAEWQRTKYVPTMEEYMANAVVSFALGPIVLPTLYFVGPKLQEDVVRDHEYNELFRLMSTCGRLLNDSQGFERESLEGKLNSVSLLVHHSGGSISIDEAKMKAQKSIDTSRRNLLRLVLGEQGAVPRPCKQLFWKMCKIVHMFYSRTDGFSSPKEMVSAVNAVVKEPLKLKVSDPYGSILSGN

SEQ ID NO: 133 - DNA, 2450 bp, Cucumis sativus
atacctctgtattcctcaatcaatgaatctttcccgacccaccaaccttggatgttttactgcctcctcctcagcttctctattccctggattggatgtgggcacaaaaactaaaactggagctttgcgctttgaagaaacaaaagaaagaataaaaaaattgttcaaaaatgttgaactttcaatttctgcatatgatactgcatgggtggcaatggtcccttctccaaactctcttaataaacctctttttcctgagtgcataaactgggtattagatcatcaaaaccctgatgggtcatggggcatactccatgaccatcagttggtgatgaaagccactctcttatccacattagcatgtgttcttactcttaagcgatgggatatcggtgatgatcatatgagcaaggcccttagttttatcaagtctaatatagcttcagctactgatgagaatcaacgttctcctgtgggatttgacataattttccctggtatgattgagtatgctaaagacttgaatttgaatctacccttggcatcaatgaatgtggatgctttggttcaaaagaaagagttggagcttagaagctgctgtagcaactctgaaggaggaaaagcctatttagcgtatgtttcagaaggaattggaaaattacaggactgggaaatggtcatgcgatatcaaaggaagaacggatcactgtttagttctccatccaccacggcagtggcttttatgcacagaaatgatgatggctgttttaattaccttcgctcagtcttacaaaagtttcatagttcagttcccgcaatatatcctcttgatatatatgctcgtttacacatggttgatagccttcaaaaactggggattgatggccatttcaaagatgagattagaagtgtattagatgaaacatacagctgttggatgcaaggggaggaaaacatattcctagatgcttcaacttgtgcaatggccttccggatgttacgtgttgaaggatatgatgtttcttcagatcaattgactcaattctcagaaggtctcttttcaaattgcctcggaggacatttaaaagactttagtgcctcactagagttatttaaggcctcccagattatcatttatccggatgagtttattctggaaaatataaactcttggactagtcgtttcctgaatcatggattatctagtggttcagttcattctgatagaactgagagactcgtgaaacaagaggcagttaatgctttcgagttcccctataattcaactctggaacgcttatcaaataagcgagcactggaaagttacagtggagacattgtgaggatttcaaaaacagcatatgcctgcttaaattttggtcatcaagatttcttggaacttgctgtagaagatttcaataccctgcaaggcatacatcgcaaggaactgaaagagcttgaaaaatgggtcatcgaaaacaaattggacaagttgaaatttgcgagacagaagttagcgtactgctatttttctgctgcagcgaccctaacctctccagaactttgtgatgcccgcttatcatgggcaaaaaatggggtactcacaaccgtggttgatgatttctttgatgttggaggatctgaagaggaattggtaaaccttatacaattggtggaaaagtgggatgccagtggggaaacgggttactgttccaaggaggttgagattatatttcttgcacttcatagcacaatttgtgaaataggaaaaaaagctttaccttggcaaggacgcagcgtgatgaggaatgttatcgatatttggttggctttgctcgagtcaatgaggaaggaagctgaatggttgaaaaataaggtagtgccatcattggatgagtacatggaaaatggctatgtatcatttgctttgggacctatagtccttccaacgctctactttgttggacctaagcttccagaggaaattgttggaaattgtgaatacaagaagctctttaagctgatgagcacttctggccgccttctgaatgatactcgaacttttgatagagagtccagcgaagggaaattaaatgccttgtctctatacatgattagtgccggtggtaagctcaccaaagaggaggccactgaagcaatgaaaggagatgttgataggacgagaagagaactgttgagattagttttgcaggagaacagtacaattccaagagcttgtaaggatttgttctggaaaatgagctgtgttgtgcatctattttacaggaaagatgatgggtttacatcccatgagttgatgaactctgcgaaagccttatttgaacaacccatggttctggatgaacttttgaacaaatgaaacaagttaatttgtaaacatggggatggagaagtccttatgaaacttcaataatgggaagtagatgtag

SEQ ID NO: 134 - protein, 785 aa, Cucumis sativus
MNLSRPTNLGCFTASSSASLFPGLDVGTKTKTGALRFEETKERIKKLFKNVELSISAYDTAWVAMVPSPNSLNKPLFPECINWVLDHQNPDGSWGILHDHQLVMKATLLSTLACVLTLKRWDIGDDHMSKALSFIKSNIASATDENQRSPVGFDIIFPGMIEYAKDLNLNLPLASMNVDALVQKKELELRSCCSNSEGGKAYLAYVSEGIGKLQDWEMVMRYQRKNGSLFSSPSTTAVAFMHRNDDGCFNYLRSVLQKFHSSVPAIYPLDIYARLHMVDSLQKLGIDGHFKDEIRSVLDETYSCWMQGEENIFLDASTCAMAFRMLRVEGYDVSSDQLTQFSEGLFSNCLGGHLKDFSASLELFKASQIIIYPDEFILENINSWTSRFLNHGLSSGSVHSDRTERLVKQEAVNAFEFPYNSTLERLSNKRALESYSGDIVRISKTAYACLNFGHQDFLELAVEDFNTLQGIHRKELKELEKWVIENKLDKLKFARQKLAYCYFSAAATLTSPELCDARLSWAKNGVLTTVVDDFFDVGGSEEELVNLIQLVEKWDASGETGYCSKEVEIIFLALHSTICEIGKKALPWQGRSVMRNVIDIWLALLESMRKEAEWLKNKVVPSLDEYMENGYVSFALGPIVLPTLYFVGPKLPEEIVGNCEYKKLFKLMSTSGRLLNDTRTFDRESSEGKLNALSLYMISAGGKLTKEEATEAMKGDVDRTRRELLRLVLQENSTIPRACKDLFWKMSCVVHLFYRKDDGFTSHELMNSAKALFEQPMVLDELLNK

SEQ ID NO: 135 - DNA, 2792 bp, Stevia rebaudiana
cccactcatcctttatcaaccaataccatcgttctgccaccggaagactgatacgcgacggacctgacgacgcctttaatctctgttggaccacctaacaaaattccgaccatcagatctactccggtggacagtttcatttgcaatttagtaaatcagcaaactaaacatcaatgaatctttcactatgcatcgcgtcccctttgttaaccaaatcaaatcgacccgcggctctgtcagctattcatacagcatcaacttcacatggtggacaaactaatcccactaatctgatcattgatacaaccaaagaacggatccaaaaacagtttaaaaatgtagaaatttctgtttcttcatatgacacagcatgggtagccatggtcccttctccaaactcacccaaatcgccttgtttccctgagtgtctcaattggttaattaataatcagcttaatgatggttcatggggtcttgttaatcacactcataatcataatcacccgttgcttaaagattctctatcttcaacattagcatgtattgttgcattaaaaagatggaatgttggggaagatcaaataaataaaggtctaagttttattgagtcaaatcttgcttcagctactgaaaaaagtcaaccatctcccattggttttgacatcatatttcctggtttgcttgagtatgcgaaaaacttggacataaacctcctttcaaaacaaacagattttagtttgatgctacataagagggaattggagcaaaaaagatgccattcaaatgagatggatggatacttggcgtatatctctgaaggactcggtaatttatatgattggaatatggtgaagaaatatcagatgaaaaatggttctgttttcaactcaccatcagcaacagctgctgctttcattaatcatcaaaatcctggttgtcttaattatttaaattcacttttggacaagtttggtaatgcagtcccaacagtttatcctcatgatttatttatccgactttctatggttgacacaattgaaagattaggaatttcacaccatttcagagtggaaattaaaaatgttttagatgaaacatacagatgttgggtggaacgagatgagcaaatattcatggatgttgtaacatgtgctttagcctttcggttattaaggatcaatgggtatgaagtttccccagatccattggctgaaattactaatgaattagctttgaaagacgaatatgcagctcttgaaacatatcatgcgtcacatatattataccaagaggatttatcttctggaaaacaaatcttgaagtcagctgatttcctcaaagagataatatccactgattcaaacaggctttctaaattaattcacaaagaggtggaaaatgctcttaagttccctatcaataccggtttagaacgcataaacactagacgaaatatacagctttacaatgtagacaatacaagaattctgaaaactacatatcactcatcaaatattagtaacactgattacctaaggttggctgttgaagatttctacacctgccaatctatttatcgtgaagaattaaaaggtcttgaaaggtgggtggtagagaataagttggaccagctcaagtttgctaggcaaaagaccgcctactgttatttctctgttgctgcaacactttcgtctcccgaattatcagatgcgcgtatttcatgggccaaaaatggcatattaactacagtagttgatgacttttttgatatcggtggtacaatcgatgaattgaccaacctgattcaatgtgttgaaaaatggaatgtagatgtcgacaaggattgttgttcagagcatgttcggattttatttttagcattaaaagatgcaatctgttggattggagatgaagcttttaaatggcaagcgcgcgatgtaactagccatgttattcaaacttggttggaactaatgaatagtatgttgagagaagctatatggacaagagatgcttatgtgccaacattaaatgaatatatggaaaacgcttacgtgtcatttgcattaggcccgattgtcaagccggctatttactttgtggggcccaaattatcagaggagattgttgaaagctctgaatatcataatctatttaagctaatgagcacgcagggtcgacttctaaacgatatccatagcttcaagagggaatttaaggaaggcaaattaaacgcggtagcattgcatttgagtaacggagaaagtgggaaagtggaagaagaggttgtggaggagatgatgatgatgattaaaaacaagaggaaagaattaatgaaattaatttttgaagaaaatggtagcattgttcctagagcttgtaaagatgcattttggaacatgtgtcacgtgttgaattttttttacgcaaacgatgacgggtttactggaaacacgattcttgatactgtgaaggacatcatttacaacccgttggtgcttgtgaatgaaaatgaagaacaaaggtaattggcctttaaaagatgataataatatcatgctcttgacgggggtactgttgtagttgtataataaaggttgtagttgtataataaaggtaataggtaatcaatagaaagcttaagttattaagtttttccctcgtgtcacacacggtgaggttcttgttaaagcagtttattttatgtttagtacgacacttggtggttgttcgttgtttattctctaagaggctttcactttgttcttaaaaaaaaaaaaaaaaaaaaaaaa

SEQ ID NO: 136 - protein, 784 aa, Stevia rebaudiana
MNLSLCIASPLLTKSNRPAALSAIHTASTSHGGQTNPTNLIIDTTKERIQKQFKNVEISVSSYDTAWVAMVPSPNSPKSPCFPECLNWLINNQLNDGSWGLVNHTHNHNHPLLKDSLSSTLACIVALKRWNVGEDQINKGLSFIESNLASATEKSQPSPIGFDIIFPGLLEYAKNLDINLLSKQTDFSLMLHKRELEQKRCHSNEMDGYLAYISEGLGNLYDWNMVKKYQMKNGSVFNSPSATAAAFINHQNPGCLNYLNSLLDKFGNAVPTVYPHDLFIRLSMVDTIERLGISHHFRVEIKNVLDETYRCWVERDEQIFMDVVTCALAFRLLRINGYEVSPDPLAEITNELALKDEYAALETYHASHILYQEDLSSGKQILKSADFLKEIISTDSNRLSKLIHKEVENALKFPINTGLERINTRRNIQLYNVDNTRILKTTYHSSNISNTDYLRLAVEDFYTCQSIYREELKGLERWVVENKLDQLKFARQKTAYCYFSVAATLSSPELSDARISWAKNGILTTVVDDFFDIGGTIDELTNLIQCVEKWNVDVDKDCCSEHVRILFLALKDAICWIGDEAFKWQARDVTSHVIQTWLELMNSMLREAIWTRDAYVPTLNEYMENAYVSFALGPIVKPAIYFVGPKLSEEIVESSEYHNLFKLMSTQGRLLNDIHSFKREFKEGKLNAVALHLSNGESGKVEEEVVEEMMMMIKNKRKELMKLIFEENGSIVPRACKDAFWNMCHVLNFFYANDDGFTGNTILDTVKDIIYNPLVLVNENEEQR

SEQ ID NO: 137 - DNA, 3117 bp, Stevia rebaudiana
atttcttttgctctgattgaacacacgattatctgtatttatgaggattgtagcatattgtttgattttttatgattattttacacttattctctgtcatctccgagtctatttggtctgacaagcaatacaatatcctcttagattcactctacataggatttaggatgcattgttattatcctaaaatcatcttcattttgatccattgcactgcctgctccgtaagcttcttatgattcggataattccggtagagaataaagttcggagtatgcatcattgaagttaatattctggattgatgttcgttaggaattggtacagtagaaaattagctagtttgcttgatttgacctagaatatagcttcagaaatttgttaatctgtgagcaatgattcagatgttgataacttttggggcaacttcatgttaaaaaacttatatattaaaatgttttcaagttggtgttgcagtaaatcagcaaactaaacatcaatgaatctttcactatgcattgcgtcccctttgttaaccaaatcaagtcgacccacggctctgtcagctattcatacagcatcaacttcacatggtggacaaactaatcccactaatctgatcattgatacaaccaaagaacggatccaaaaactgtttaaaaatgtagaaatttctgtttcttcatatgacacagcatgggtagccatggtcccttctccaaactcacccaaatcgccttgtttccctgagtgtctcaattggttaattaataatcagcttaatgatggttcatggggtcttgttaatcacactcataatcataatcacccgttgcttaaagattctctatcttcaacattagcatgtattgttgcattaaaaagatggaatgttggggaagatcaaataaataaaggtctaagttttattgagtcaaatcttgcttcagcaactgacaaaagtcaaccatctcccattggttttgatatcatatttcctggtttgcttgagtatgcgaaaaacttggacataaacctcctttcaaaacaaacagattttagtttgatgctacataagagggaattggagcaaaaaagatgccattcaaatgagattgatggatacttggcgtatatctctgaaggactcggtaatttatatgattggaatatggtgaagaaatatcagatgaaaaatggttctgttttcaactcaccatcagcaacagcagctgctttcattaatcatcaaaatcccggttgtcttaattatttaaattcacttttggacaagtttggtaatgcagtcccaacagtttatcctcttgatttatatatccggctttctatggttgacacaattgaaagattaggaatttcacaccatttcagagtggaaattaaaaatgttttagatgaaacatacagatgttgggtggaacgagatgagcaaatattcatggatgttgtaacatgtgctttagcctttcggttattaaggatccacgggtataaagtctccccagatcaattggctgaaattactaatgaattagctttcaaagacgaatacgcagctcttgaaacatatcatgcatcacagatattataccaagaggatttatcttctggaaaacaaatcttgaagtcagctgatttcctcaaagggatattatccactgattcaaacaggctttctaaattaattcacaaagaggtggaaaatgctcttaagttccctatcaataccggtttagaacgcataaacactagacgaaatatacagctttacaatgtagacaatacaagaattctgaaaactacatatcactcatcaaatattagtaacacttattacctaaggttggctgttgaagatttctacacctgccaatctatttatcgtgaagaattaaaaggtcttgaaaggtgggtggtacagaataagttggaccagctcaagtttgctaggcaaaagaccgcctactgttatttctctgttgctgcaacactttcgtctcccgaattatcagatgcgcgtatttcatgggccaaaaatggcatattaactacagtagttgatgacttttttgatatcggtggtacaatcgatgaattgaccaacctgattcaatgtgttgaaaaatggaatgtagatgtcgacaaggattgttgttcagagcatgttcggattttatttttagcattaaaagatgcaatctgttggattggagatgaagcttttaaatggcaagcgcgcgatgtaactagccatgttattcaaacttggttggaactaatgaatagtatgttgagagaagctatatggacaagagatgcttatgtgccaacattaaatgaatatatggaaaacgcttacgtgtcatttgcattaggcccgattgtcaagccggctatttactttgtggggcccaaattatcagaggagattgttgaaagctctgaatatcataatctatttaagctaatgagcacgcagggtcgacttctaaacgatatccatagcttcaagagggaatttaaggaaggcaaattaaacgcggtagcattgcatttgagtaacggagaaagtgggaaagtggaagaagaggttgtggaggagatgatgatgatgattaaaaacaagaggaaagaattaatgaaattaatttttgaagaaaatggtagcattgttcctagagcttgtaaagatgcattttggaacatgtgtcacgtgttgaattttttttacgcaaacgatgacgggtttactggaaacacgattcttgatactgtgaaggacatcatttacaacccgttggtgcttgtgaatgaaaatgaagaacaaaggtaattggcctttaaaagatgataataatatcatgctcttgacgggggtactgttgtagttgtataataaaggttgtagttgtataataaaggtaataggtaatcaatagaaagcttaagttattaagtttttccctcgtgtcacacacggtgaggttcttgttaaagcagtttattttatgtttagtacgacacttggtggttgttcgttgtttattctctaagaggctttcactttgttcttaataagaagtttttattgtgttg

SEQ ID NO: 138 - protein, 784 aa, Stevia rebaudiana
MNLSLCIASPLLTKSSRPTALSAIHTASTSHGGQTNPTNLIIDTTKERIQKLFKNVEISVSSYDTAWVAMVPSPNSPKSPCFPECLNWLINNQLNDGSWGLVNHTHNHNHPLLKDSLSSTLACIVALKRWNVGEDQINKGLSFIESNLASATDKSQPSPIGFDIIFPGLLEYAKNLDINLLSKQTDFSLMLHKRELEQKRCHSNEIDGYLAYISEGLGNLYDWNMVKKYQMKNGSVFNSPSATAAAFINHQNPGCLNYLNSLLDKFGNAVPTVYPLDLYIRLSMVDTIERLGISHHFRVEIKNVLDETYRCWVERDEQIFMDVVTCALAFRLLRIHGYKVSPDQLAEITNELAFKDEYAALETYHASQILYQEDLSSGKQILKSADFLKGILSTDSNRLSKLIHKEVENALKFPINTGLERINTRRNIQLYNVDNTRILKTTYHSSNISNTYYLRLAVEDFYTCQSIYREELKGLERWVVQNKLDQLKFARQKTAYCYFSVAATLSSPELSDARISWAKNGILTTVVDDFFDIGGTIDELTNLIQCVEKWNVDVDKDCCSEHVRILFLALKDAICWIGDEAFKWQARDVTSHVIQTWLELMNSMLREAIWTRDAYVPTLNEYMENAYVSFALGPIVKPAIYFVGPKLSEEIVESSEYHNLFKLMSTQGRLLNDIHSFKREFKEGKLNAVALHLSNGESGKVEEEVVEEMMMMIKNKRKELMKLIFEENGSIVPRACKDAFWNMCHVLNFFYANDDGFTGNTILDTVKDIIYNPLVLVNENEEQR

SEQ ID NO: 139 - skipped

SEQ ID NO: 140 - protein, 785 aa, Arabidopsis thaliana
MSINLRSSGCSSPISATLERGLDSEVQTRANNVSFEQTKEKIRKMLEKVELSVSAYDTSWVAMVPSPSSQNAPLFPQCVKWLLDNQHEDGSWGLDNHDHQSLKKDVLSSTLASILALKKWGIGERQINKGLQFIELNSALVTDETIQKPTGFDIIFPGMIKYARDLNLTIPLGSEVVDDMIRKRDLDLKCDSEKFSKGREAYLAYVLEGTRNLKDWDLIVKYQRKNGSLFDSPATTAAAFTQFGNDGCLRYLCSLLQKFEAAVPSVYPFDQYARLSIIVTLESLGIDRDFKTEIKSILDETYRYWLRGDEEICLDLATCALAFRLLLAHGYDVSYDPLKPFAEESGFSDTLEGYVKNTFSVLELFKAAQSYPHESALKKQCCWTKQYLEMELSSWVKTSVRDKYLKKEVEDALAFPSYASLERSDHRRKILNGSAVENTRVTKTSYRLHNICTSDILKLAVDDFNFCQSIHREEMERLDRWIVENRLQELKFARQKLAYCYFSGAATLFSPELSDARISWAKGGVLTTVVDDFFDVGGSKEELENLIHLVEKWDLNGVPEYSSEHVEIIFSVLRDTILETGDKAFTYQGRNVTHHIVKIWLDLLKSMLREAEWSSDKSTPSLEDYMENAYISFALGPIVLPATYLIGPPLPEKTVDSHQYNQLYKLVSTMGRLLNDIQGFKRESAEGKLNAVSLHMKHERDNRSKEVIIESMKGLAERKREELHKLVLEEKGSVVPRECKEAFLKMSKVLNLFYRKDDGFTSNDLMSLVKSVIYEPVSLQKESLT

SEQ ID NO: 141 - DNA, 3007 bp, Phaeosphaeria sp. L487
tattggtattatcacgagacatattcaaaaccattgcttggagcttgtcaaagcgactcactattcatcatgtttgccaaattcgatatgcttgaagaagaagcccgggcccttgttcgaaaagtaggtaacgcagttgatccgatttacggcttcagtaccacgagctgtcagatctacgacacagcctgggcggccatgatatctaaagaagagcatggagacaaagtgtggctctttcccgagagtttcaaatatctccttgaaaagcaaggcgaggacggtagctgggaaagacatcccaggtcgaagacggttggcgtcttgaacacagcggctgcgtgtcttgcactcttgcgtcatgtcaaaaaccctctacagctacaagatatcgctgctcaagatatcgaattgcgcatccagcgtgggctaagatcacttgaagaacaacttatcgcctgggacgacgtgttggacaccaatcacattggtgttgagatgattgtccccgcattattggactatttgcaggcagaagacgaaaacgtggactttgaattcgagagccacagcctactgatgcagatgtacaaggaaaaaatggcccgcttcagtcctgagtctctctaccgggcgcggccatcgtcagccctccacaatctggaggctctgattggcaagctggatttcgacaaggttggacatcacctgtacaatggttcaatgatggcatctccgtcctctacagcagcttttttgatgcatgcttccccatggagtcacgaggctgaagcatatttgcggcatgtattcgaagctggtacaggcaaaggttcgggcggatttccaggcacatatcctactacgtactttgagttgaactgggtgctgtctactcttatgaaaagcgggtttactctatctgatctggagtgtgatgagctttccagcatcgcaaacaccattgctgaagggttcgagtgtgatcatggtgtgatcggttttgctccacgtgcagtggatgttgacgacacggccaaagggctactgacgctgactttgcttggcatggatgaaggtgtcagtcctgcgccaatgattgccatgttcgaagccaaagatcatttcttgacgtttctgggggagagggacccaagtttcacgtcgaactgtcacgtgctgctttctctgttgcatcgaacggatctactgcaatacctgcctcagatacggaaaacgacgacgttcctgtgcgaagcatggtgggcgtgcgatgggcagatcaaagacaagtggcatctgagccatctgtacccaacaatgttgatggtgcaagcgtttgcggaaattttgctcaagagcgccgagggagagcctctccacgacgctttcgacgcggccacgctatcgcgagtctccatctgcgtgttccaggcgtgcttacgaacgctgctggcccagagccaggatggatcgtggcatggccaaccagaggcttcgtgctatgcggttctaacgctcgccgagtcgggtcggctcgtgttgctgcaggccctgcagccgcagattgcagctgccatggaaaaggccgcagacgtcatgcaggccggacgctggagctgcagcgaccatgactgtgactggacgtccaaaacggcatatcgcgtggaccttgttgctgcagcgtaccgcctagccgccatgaaggctagctccaacttaaccttcaccgtcgacgacaatgtgtcgaagcgtagcaacggtttccagcagctggtcggccggacagatctgttctctggggtaccggcatgggaattgcaggcgtcatttcttgagagcgctctatttgttcccctgctcagaaaccaccggctcgacgtatttgaccgagacgatatcaaggtcagcaaggatcattatctcgacatgattcccttcacttgggtcggctgcaataaccggtcacgcacatatgtttcgacatcgtttctatttgacatgatgatcatctccatgctgggataccagattgacgagttcttcgaagctgaggccgcccccgcgtttgcccagtgcatcggccaactccaccaggtggttgataaagtcgttgatgaagtgattgatgaagtcgttgataaagtcgttggtaaagtcgtcggtaaagtcgtcggtaaagtcgttgatgagcgagtcgactcaccaacgcacgaagccattgcaatttgcaacatcgaggcttcgctgcggcggttcgtcgaccatgtgctgcatcaccagcatgtacttcacgccagccagcaggagcaagacatcctgtggcgcgagctgcgggcttttttgcacgctcatgttgtccagatggccgacaactccaccttagcgccacccggtcgcaccttcttcgactgggttcgcactaccgctgcagatcacgtggcatgtgcctactcgtttgcatttgcatgctgcatcacctctgccaccatcggccagggtcagagcatgtttgccacggtcaacgaactatacctcgtgcaagccgctgcccgccatatgacaacaatgtgccgcatgtgtaacgacattggctctgtcgaccgcgatttcatcgaagctaacattaactcggtccatttcccagaattctcaaccttgagcttggttgccgacaagaaaaaggctcttgcacgcctggctgcgtatgagaagtcttgtctgacccatacactcgaccagttcgagaacgaggttcttcaatctcccagagtctcctcggctgcgtctggtgatttccgcacaagaaaggtggccgttgtacgcttttttgctgatgtcacggatttttacgaccagctatacatactccgcgacctctccagctctttgaaacacgtcggcacgtagagacatgcgcttagtaatgttccatcattgataggcctgtaatgatgtatctttagctcccctcttaacttgggtagacaacctggatttttactac

SEQ ID NO: 142 - protein, 946 aa, Phaeosphaeria sp. L487
MFAKFDMLEEEARALVRKVGNAVDPIYGFSTTSCQIYDTAWAAMISKEEHGDKVWLFPESFKYLLEKQGEDGSWERHPRSKTVGVLNTAAACLALLRHVKNPLQLQDIAAQDIELRIQRGLRSLEEQLIAWDDVLDTNHIGVEMIVPALLDYLQAEDENVDFEFESHSLLMQMYKEKMARFSPESLYRARPSSALHNLEALIGKLDFDKVGHHLYNGSMMASPSSTAAFLMHASPWSHEAEAYLRHVFEAGTGKGSGGFPGTYPTTYFELNWVLSTLMKSGFTLSDLECDELSSIANTIAEGFECDHGVIGFAPRAVDVDDTAKGLLTLTLLGMDEGVSPAPMIAMFEAKDHFLTFLGERDPSFTSNCHVLLSLLHRTDLLQYLPQIRKTTTFLCEAWWACDGQIKDKWHLSHLYPTMLMVQAFAEILLKSAEGEPLHDAFDAATLSRVSICVFQACLRTLLAQSQDGSWHGQPEASCYAVLTLAESGRLVLLQALQPQIAAAMEKAADVMQAGRWSCSDHDCDWTSKTAYRVDLVAAAYRLAAMKASSNLTFTVDDNVSKRSNGFQQLVGRTDLFSGVPAWELQASFLESALFVPLLRNHRLDVFDRDDIKVSKDHYLDMIPFTWVGCNNRSRTYVSTSFLFDMMIISMLGYQIDEFFEAEAAPAFAQCIGQLHQVVDKVVDEVIDEVVDKVVGKVVGKVVGKVVDERVDSPTHEAIAICNIEASLRRFVDHVLHHQHVLHASQQEQDILWRELRAFLHAHVVQMADNSTLAPPGRTFFDWVRTTAADHVACAYSFAFACCITSATIGQGQSMFATVNELYLVQAAARHMTTMCRMCNDIGSVDRDFIEANINSVHFPEFSTLSLVADKKKALARLAAYEKSCLTHTLDQFENEVLQSPRVSSAASGDFRTRKVAVVRFFADVTDFYDQLYILRDLSSSLKHVGT

SEQ ID NO: 143 - DNA, 2658 bp, Cucurbita maxima; identical to SEQ ID NO: 127

SEQ ID NO: 144 - protein, 789 aa, Cucurbita maxima; identical to SEQ ID NO: 128

SEQ ID NO: 145 - DNA, 1713 bp, Arabidopsis thaliana
actattacacaatgaaatcaacactacattttcacatcaaaatcacattccttccatggccttcttctccatgatctccattctccttggctttgttatctcctccttcatcttcatcttcttcttcaagaaacttctctccttctccagaaagaacatgtctgaagtctccactctcccctctgttccagtggtaccagggtttcctgttattgggaacttgctgcaactaaaagagaagaaacctcacaagactttcactagatggtcagagatttatggtcctatttactctataaagatgggttcttcttctcttattgtcctcaattctactgagactgccaaagaggccatggtgacgcggttttcgtctatctcaacgaggaagttgtcaaatgcgttgacagtccttacttgtgacaaatctatggttgctactagtgattatgatgatttccacaagttggtgaaacggtgtctcttgaacggtcttttgggtgctaatgcacagaaacgaaaaagacattacagagatgcactcattgaaaatgtgtcttccaagttgcatgcccatgctagggaccatccacaagaacctgtaaacttcagagctatatttgagcatgagcttttcggtgtagcattgaagcaagcttttgggaaagatgtggaatccatttatgttaaagaactcggtgtgactttgtcgaaagacgagatcttcaaggttttagtacatgacatgatggaaggtgcaattgatgttgattggagagacttcttcccatacttgaaatggattccaaataaaagttttgaagcaagaatccagcaaaagcataaacgtagactcgcagtgatgaatgctctgattcaagatcgactgaagcagaatggttcagaatcggatgatgattgctatctcaacttcttgatgtcggaagcgaaaacactaaccaaggagcaaattgctatcttggtttgggagacgattatcgagacagctgacactactttggttacaactgaatgggccatctatgagctcgctaagcatccaagtgtccaagatcgtctgtgcaaagaaatccaaaatgtctgcggaggagaaaagttcaaagaagagcaattgtctcaagttccttatctcaatggagtctttcatgaaacgcttaggaaatacagtcctgctcctctagttcccattcgctacgcccacgaggatacgcaaatcggaggctatcatgtccctgcaggaagtgagattgcaataaacatatatggatgcaacatggataagaagcgttgggagagaccagaggactggtggccggagcggtttcttgatgatggcaaatatgaaacgtcagatcttcacaagacaatggcgtttggagcgggaaagagggtttgtgctggtgctcttcaagcatctctcatggcaggcattgctattggaagattagtgcaagaattcgagtggaagcttagagatggcgaagaagagaatgtggatacatatggcttgacctctcagaagctttatcctcttatggctattatcaatccaaggcgttcttaagacagaaatctcttctttcttttgttagtttttaaccttgtatcaacttttatttgtaacaaatgctgttttgtagtactatttatgttttactgtgttatattttactatcctctgagattgcatca

SEQ ID NO: 146 - protein, 509 aa, Arabidopsis thaliana
MAFFSMISILLGFVISSFIFIFFFKKLLSFSRKNMSEVSTLPSVPVVPGFPVIGNLLQLKEKKPHKTFTRWSEIYGPIYSIKMGSSSLIVLNSTETAKEAMVTRFSSISTRKLSNALTVLTCDKSMVATSDYDDFHKLVKRCLLNGLLGANAQKRKRHYRDALIENVSSKLHAHARDHPQEPVNFRAIFEHELFGVALKQAFGKDVESIYVKELGVTLSKDEIFKVLVHDMMEGAIDVDWRDFFPYLKWIPNKSFEARIQQKHKRRLAVMNALIQDRLKQNGSESDDDCYLNFLMSEAKTLTKEQIAILVWETIIETADTTLVTTEWAIYELAKHPSVQDRLCKEIQNVCGGEKFKEEQLSQVPYLNGVFHETLRKYSPAPLVPIRYAHEDTQIGGYHVPAGSEIAINIYGCNMDKKRWERPEDWWPERFLDDGKYETSDLHKTMAFGAGKRVCAGALQASLMAGIAIGRLVQEFEWKLRDGEEENVDTYGLTSQKLYPLMAIINPRRS

SEQ ID NO: 147 - DNA, 15907 bp, Stevia rebaudiana
  misc_feature (6114)..(6114): n is a, c, g, or t
  misc_feature (15633)..(15633): n is a, c, g, or t
ataaggggagacggagtggggctcgggaacattcgggaaacaagatttttggatgggaccgattgggaataccacccttcggattcaggacgaggtgggtcggggagtacacagcggacgttaccgaacgtgggaagaagaaaagcaaggggacatggggaagttgtgaaagtgagatgacaccgcgtaaaatagtaaaaatcgaggaaagctgatgtgacgctgatgtgaaagcggggaagagtaggtaacccagaacgactccgtgtggtctgatatgttcgtttattaagtagactagagaattatttactttcatgatattaacaaactataaaaagtcatataaaaaggaaatgtgctcaactaaaatgaggtgaaaataactttttaatcgaaaaaccacgcgagttattatttgcttttttttaattattaaatgtaatagcgtcaatcaaactcaaatcttatttaaatacaacctcaagcccaaacttcaaagaatactccactagtcaccgccattattgtctctcttgccgtcgacaaaatggatgccgtcaccggtttgctgacagttccggcaaccgcaataaccatcggcggtacggccgtcgcactcgccgtcgctctgatattctggtacctcaaaagctacacatctgcacgcaggagccaatcaaaccatctccctcgggttcccggtactcttctatacccaaatatctggatctgtgttattgattctcactagcaaatagatcgaaattcttcawttttaatgcaaaattgacctgcttaaaatcaagaggtgttgttttcatctggtttaggaccacatgccctacactggttatgtgattaatgatgtgtgtaatcaaatttttcagaggtacctggtgtgccattattggggaatttattgcagttgaaggagaagaaaccttacatgacttttacaagatgggcggcaacttatggtccgatttattcgattaaaaccggagcaacttctatggtggtcgtcagttcaaatgaaattgcaaaggaggtaagaacatagttctccctttttttttctgttttttaattatcaaacaataaataaagagctcgaatccaatgaaagcatgaaacatgaaacatttgagataataaacacaattaaggtcgatttaaacaattaaggtcaactaaattttaacccaaataaatcgtaaattgcgggtgtatagtgaatacgtgaagcggttttgtaatttgttacgagagtgagattattagaaaagattcccattgccggctgattatgattcttcgtaataattttgcacaaacgacaacggtgacaaattctgacttaaaatgaatattataatcacttacacgtaacatatttaataatttattaatctttgactcgatcaaaaattgggagtgtgtaggtgaagaaagctataatttaattatttaacgattgagcaccaaacgcatcttataaactactagatctattcgatgtcattgatatgataaaaaaatgtaattatattttaaacgtaaaataataatttcataaacagcgttgactttcgctttacgatccaagagattttaatatatttttgaaaagaaatatatttctaacaggtggatcgagtatgttaattctaagtactacaaaccggaagttcaagattaggttaattttattttattatatttttgaaacaccctaaactacaaactactcctaatcgatttggtttgaaccgagatggctttcaaagagtacctaccatcccaaaagacaaacttttttattttattttgtttatttatttttttaacatatttgcgagtcaaattgtaaaattcaataatttggaaattagttattgcattaactaatatcaggttatatgtaaagaatttgtatcgctggaaaattattaggttacgtgtactggttttataattaaattgacatgtagatgcaaataggcaaaaaccatttaactgaacacatattttatttaggtgtgttgattttaactaaacattaatatctttacattgaataaaattattaaaattgaaattattaagaaatgtattaaatttaaattgtgtttaacatcggttaagaacttgactaaaaatcaatggcgcctcttcaatgatgatcacgtaatggtttaacacaccaaattcatttttgacgctcatrataggctccactacgcccagtcttaccgaagttgagatcatgtggccatcaatggtcatgaattcggatcttacatcgataaaaattataaataaaaaaatgtacagaacttgtgacatgattgtgataatgctattctttttcaggcattggttaccagatttcaatctatctcaaccagaaacctatcaaaggcattaaaggttctcacagcagataaaaccatggtggcgatgagtgattatgatgattatcataagactgtcaaacgccatatactgaccgctgttttgggaccaaatgctcaggtttttctaattaaattgtgtgtaattgacactcttttaagttctcattttgaaattttgatgtatgttttcagaagaaacaccgcatccatagggacatcatgatggataatatatcaacccaacttcatgaatttgttaaaaataatcctgaacaagaggaagtggatctaaggaaaatattccaatccgaactttttggattagctatgagacaagtgagtttgcatcttatatttaactactaattgataattaattaactagtttaaatagttgtgtattacatgagttaaataaaaataatactttattgtaaagtagtgaaataagaaatagagtatcaaaataaaagaacattacatatgaaatattttaaaataagagaagcgggaaaatgatatgtctggttttaaatcgtgactttattgtaatcgttatgcttttggttttgtataaaaaaaataaaaaatttatcaaccaatcagaatataccaatcgtgacatgtagcgcaaaagttatttatttattagatataaatatttaaaacaatttatttttcatttatattttctcaggcattgggaaaggatgtggagagcttatatgttgaggatcttaaaatcaccatgaaccgagacgagatatttcaggtattggttgttgacccgatgatgggtgcaattgacgtcgactggagagatttcttcccgtatctaaagtgggtcccgaataaaaagtttgaaaacacgatccaacaaatgtatatccggagagaagctgtgatgaagtctcttattaaagaacataaaaaacgtattgcatccggagaggtaattgataaatgaaatattgatgtaattcatagatttttaacctagcttgctaattaagttcaattcactttagaatataaattaacacgttttaatatgttaaaaaacagaaattaaacagctacattgattacttgctatcggaagcacaaacgttaaccgatcaacaactacttatgtctctatgggaacctattattgaatcatcagacaccactatggttacaactgaatgggctatgtatgaacttgcaaaaaaccccaaacttcaggtttgtattgttctttcaacctaaaaccaacaaatattaaaagttaaaaccaatacttgcatataaaaatgtaaccaacttcaataaatatgatttaaggtaattacaaaagttagccggttttttgcaccaagttagaaacaaaagtcaacatggtcaaaagtaaagtcacaacccaacttaaaacatgtaatgaatgatatatggtttaccataatctgctgttatttattttgtgagttttatttatgatctaattaactcgatcaggatcgtttgtatcgggatatcaaaagtgtttgcgggtcagagaagattacagaagaacacttgtctcaactgccatacataactgccatttttcatgaaaccttgagaaggcatagtccagttcctataattccattaagacacgtgcatgaagacacagtgttaggagggtaccatgtgccagctggaaccgaggttgactttttaaataagtcaaacatatgatttttttgttattatatgaccggactgtacgttgtgtttattaatttgtagctagcggtaaacatttatggatgtaacatggataagaatgtgtgggagaatcctgaagaatggaatccagagagattcatgaaggaaaatgaaacgatagatttccagaaaacaatggcgtttggaggtggaaagcgcgtatgtgctggttcgcttcaagcattgttgactgcttccattggaattggaagaatggtgcaagagtttgagtggaaactgaaagayatgacccaagaagaagttaatacgattgggcttacgacccagatgcttcgtccactgcgggccataataaagcccaggatatgatcgcgggtgtattgctaaaacctatcgatgcgtttaaccaataaatatcgtttagcggtttgtattttgttaagtgtttagttgctggagactttgaatgtatgtgacttggtatcttttatcataagttttagtttggtgtgtttatgccaacaacttcgacaagttgtcagacttgtgttgaatataatcaaaaccagaatcgattaaaacaaactagttaggaatatatctatgggccgtgggttttgggttgtggatgtttatttttatactaataaaatttagcataataatacccgaataattttgaagttattacatagaacacattttataaaataaattaaattatattaggttcaatggatcaacccatgaacctttctggttgacaccatgaagaccagtttagttaaatgtgttcacaatatattgacccgaaaccgttcacgctcctaccttggaaataagtttcacttttgtttggaaacatgctcgaagaggaagaggatgtatagattaacaaagtcacatattcccaagttagtttagtttacgatttagtaagatgccttatatcggtgtgtataattccaaactacaaacagagtgaaaatatcatgggctttgcccacctagattaacccatccagttgtctcctatgttgaagatgtaaataaaattaacgacttaacattttagtgtataaattagaccatgtataatactgatcacactcttcatttcttcaccgttttacttttctgtcaccacccccacactttcccgccaacctatgtaatacattactcactctcaaccctctccacctttatttcttagtaatttttatttaaaaaagtgaaacttgactaaaatcaaaacaacaataaccaaaattcaaaccaagttcaataaaattaaatagcaataattaaaatagcaataaataaaattcaaacaaatataattaaaaaacaattaaactagaaaagcgggatgatgtttcacaatgtctcacacttcgacattcactgtcgtacgccccgttatcctttggtaatcgggaatagactgctttcgaatgtcgttctccgtccaaccgtcttcaaggttgtctcgaactcgcttttctggtgtactgaacaagcttgttcggttcctcaagtcacgccatttattactcacttgatgagccatatgagtttcgtcttcgggggcatcgagtaggaaaagccgatgaacttgatcccagaacgggatacgaaggaacatcggtttcgagctttcattgacgagaatccaagcccgtgccaaacggacctcctcctcatggctgcacctccttgaactcatttttttaaatgtttggttgaaaagagagtattttataagtttgtgagattgtaagatgaataaaataagaggacaaggttattcgtataggtaaaatatatatatttttcaattacacagtcgttgaatgattttttttttaattcaaagggcgggcacatggcccaatcaaaagggggatgggtggggggggggggggktcagggttgrggatagggcgttgttcctatcggctaccgcgatccatgtcantcatccccgctatgggtggggcaagtattacacccagccttagagttgttatcacacgattgctaagtcaacctagaaggcgaattcatcaataagctctggtttagttgaaaagtgaaatatcaattgggtcaaaaggaatagcaaatcttctagagttgttctgacaatacaagcatgtagtttgttggcattgtttttttttgtcctcttcactaatgggaccgtacccccagataagcggaaaccggatagaatccgtaaacctctcccctccctcaggtttgaaccagtgaactctatccaaaatacactttcttcccatcaccgaaaattgcccagagcaatgctctagacaagatttgaacctgagacctcccaaagagagagcctacacacctcatcctaaccacttgagctagagagaacttaccgatgattctttaaggatacggatgtagaacgcatttgtggaactgatggaggcatccttcttctttattgcttatttactccagtcattcaaccttcaataccagagattaaggttacgatttcaataagcaatccaaaaacattgaacttgaattgtcggcgggagaagaagagatggggtagaattcgtgatagagatgaatgaaattagggtttaccgaaaattgaagagaaaaccccgtgtgtgtaatccctttcgggtttgggtttgcgccggattaaaaacagacatgtatggaacwtmttttgtaaatgaaaaytgaaggttaattgtgagcttgaccttccaatgtggaggtcatactaggggcaagtttaaatgaacaccaggtgaagggtcaacttggatttaacccaggttcggttctgatgggggcgaggggttacctattccacggggttcccgcgcatcagggggcgtctgtttcaccgctgcccggtgggcccggttcagacaacatacgtggtacgtgaaaacaacatcgtaaaaaaaatttgtgagcttgacacgtgtatgatacttcctgttcaaaaagaaaaaaattgtgagcttgaccgtgtatgaaacttaggtcacacggtgtcctcccaattctccccacttctcctcactgccacgttagcgtcacatcagcttttcccacttttttttatttcactggcaatcgtctcacttttccccacttttctcacttttccacctcatcacatatttaatattaattttaattattctttttttaacattaaaaaaaaaaagactttcatttattaaaataaaaaaatcatacaacttaataaaaaaaacatacgagttaataaaaacaacgaaaaaaaatacaactactcattcgcatgattggcatgccattcttgatacaaatctccaaatgctcgatgaggtcggcacgaagattgtcgtgagttgtgtgtgatcgtatttggctccaaatatctggttctggaagttcttcacttggggagtcttctatgtgatcgggtgatattgcttgacccgttaccttcaaaatcatgttatgtaggatgatacacgtgtacatgatttttcttaattttcgtggatgcatttgttttgccggatagtttaggatgtgcaattttccttttagaacaccaaatgtgtcacaccctgccggtggcggaaaacaccggcgtgacgtagtgattgttcggaaactcaatggtttatattaaatgtttcataattgcatttaagtcacgattaaattcgtctaatacaaataatccaaataaaaagtctcacatgcgagattcaaaatgttcaatcataataaaaagaattaaacaaaaacatccaagcagttaatcacgcaatccttaacttcatttattccctgaaacgcacataaacaaaacaagtgtcaactacaaaagtagttggtgagaatacaacgagtttataaagttatgcatgagtttacaaagatttagttatgatcataagtcctgatagaataaaccgttagtgtaatctcaacatgtaaactactattgatcaagccttagaaaccgagtttgagtttaagtaccaataatatattaagcgttgtagttgatgttgacagtggtgtgatcacccaaataggttagggtggcctggtaagggtcaatagtactatcaccacaccccgtggctgtaacagttaatgatcaataatcccatagtaaacacagagttttcacaagcagtaaacgatatcaagttctaaacgagtcataaatgcatgagcgtataagagtgtgcgtgtggttcgtgtttgtacgtttcagccccgagtttaaaataaaagtataaatagtaaaaggggagttgtaactcaccttgcaagcaaacgagtacagtttatgattcacgtgtttccaaacgattgtgactattgcgtatctcgacgtaaccctataataatatatattatattgttacgtgttagtatatatatatatattatgtgacgacgcgtttaatatatatatatatatatttatcggtggataattgttaatacgttttttgtttattagtaaactaattggattaggtttaaaaataaacaacgatatataaatatttatattttatatatcgtgatttatttatataatttttaacgtttacgtttttatatttaaacgttacaaaaataacctttttggtaaacgtttataaaagtgtgatttgttattgttattagattcggttttgaaaatggtgaatttcgatataaaatgggtcgaaaacggataagtaacgaacccgtaacgacgttttaaagtttagaaaataaccgtattcgtaacaaaatcgagtcgggtaaaccgactgagaccggggcgagcgttgctcgggtccgggtctcgggaatggtctgtggttcaataaaataataaaagattaaaatgggaaaaatatggttatgccggggttcgaaccggcgaccttgtgtctaaacgtgatgcaccccagccaactcggctggagtgactaacctgttggatcttggttttaaattatacttatcctatarttcmtckgyysmtcagwwtcgtwktrgrtgttagaactcagcgactggataacacattcgttcaaatcgtgtttcagcaacaaaaccggatttaggattcttgttamtctaaacgagacgaacatgaagatggtattaccttggacaatggatatcggagatggtagatcggaaatgtgaactcgccggcggtcgtggttcaggaatggagctctcggtcgttgttcttgagtttggtggatgtgttaagctttggaaatgagcactatgatgaagtcgatcgattatagatgctaattcgatcgtggggaggagttaaaaccgtcggtttaagttttaaagattcaattaatttcgagtgattactcgtgattaaagacgttaacgggtatattgatagtgggtttattctccttaaatgcaaccgaacgtggtggtgttattaaggcttcgattggttaatgaatcgtggtatccatttatgtgtgttcgtgggtcggagttgggcgaagaaggagggtccgtgggtgtgggtcgcgcctgttgactggtcaactgggttagatgtttcggtaatggcaggaacggcccctcatgatttaagttacctattttggacaccatctccaagttaaatctaattttaagtttcgtttattatattttggccacaattcgtttataattggtataaatacataaaaatttatactttttataattaaagtcttatatatttatatttttataaaagtttaacacaactttatataataaatatatatatatatatttatttatcgtattcttttatttataaactttcgtaaatattacgtattacctttatttaattgctcgtgatatatatgtgtatgacgcgcgaacttgttccacgaaacgtttctcattaagtacgagattaataaatacacgtcggagatacgatcggaacattaaacacacgtcggaaaaaccatcggaaaaatacgaaatgtcacagtatcccctatttgaggaaatttcgtcccgaaattaagaattaagtagtagttttcgtaaacaattgtgggtatttagtcttcatatagtcttcgcgttcccaagtgagttcagggccacgttttgcattccaacgaactaagacaattggtatgcgacttctcttgagaatcttttcaccagtatccaaaatctctaacggtctctcgacaaagtgcatgttttcctcgatagtaatgtcatcgagtggtatttgcaagttttcgttggcatgacacttctttaagtttgacacgtgaaatgtgggatgtatgttactaagttcctcaggaagttctaaacgataagcaacgtttccaatgcgttcaagaacagtaaacggaccgacatagcgaggagatagtttacccctctttccaaatcgagccacgcctttccaaggtgaaacctttagcaagacacggtcaccgacttcaaaggttacctctttgcgatgtttatccgcgtagttcttttgtcgactacgagctttgagtagattgtcacgaacttgaatgattctgtccaaggtatcttgaacaagaacaggaccggtaagttgcacatctccaatttcattccaacaaattggtgatctacacttcctaccgtataacgcttcaaatggtggcatgttaatactcgagtgataactattgttgtacgagaattcggcaagcggtaaataagtatcccaattgccaccgaaatcgatgacacaagcacgtaacatgtcttccaacgtttggatagtcctctcggattgtccatccgtttgtgggtgatatgccatacttaagttcaactgagtacctagagctgtttgtaaggcttgccaaaaacgtgaagtgaaacgagcatcacgatccgatataatgttcaaaggtactccatgtgcacgcacgacaacatcaatataaatctgagcaagtgtgctaacgggattatcttcgcgaatagctatgatatgtgcggatttggttaaacgatcgacaataacccaaatagtatcgtgtttacgagtcgttcgtggaagtttagwaataaagtccatcgctatacattcccacttccaaacgggtaactcgggttgttcaagcatgcccgatggtcgctgatgttcggctttgactttagcacaagtaagacatttggagacgtatgtggcaatttccttcttcatacccggccaccaatagtgacaacgaagatcttgatacatcttgtcggcaccaggatgaatcgaataacgagttttgtgtgcctcgtttagaaggaacatgtgtagatcgtctcggttaggaacccaaactctatcacttatataaataagtccgttaggtttggtgatgaaatgaatctcggctccacaagcgagttctcccttgagattatcctcggcaagggatgtttgttgagctttgtagatacgagattgaatgtcgctttgtatttggatactatggagttgaatggaagtcttacgacttaaggcatcggcgacgacattagccttgccaggatgataacaaatctcgcaatcgtaatcattaaggagctcgatccaacgtcgttgcctcatgtttagttccttttgatcgaaaatgtgtttgagactcttatgatcggtgtagataatacatttagtaccatagagatagtgtctccaaatcttaagagcgaaaacgactgcaccaagttcaaggtcgtgagtggtatagttcttttcgtggattttaagttgtcttgaagcgtaagcgataaccttgcctcgttgcataagaacgcaacctagaccttggttagaagcatcacaataaaccacgaaatcatcacttccctcaggtagtgcgagaattggagcgttgcacaacttgtgtttaagagtttgaaaagcttcttcttgtctggatccccaaacatacggtgtgctcttttgagtcaaggcggttagaggtaatgccaccttggagaaattagagatgaaccgtcgataataacctgtcaagaaaagaggtcaaatcaaaggttcacttaagggaaacataagaagaatgtgtttaaaatgatgaggatattgacctgccaaacccaggaaggatcggatctcggtaggtgttgttggtgtattccaattcttgaccgtctcaatctttgccggatcaacatgaattcctttttcgttcactatgtggcctagaaattgaacctctttaagccaaaattcacacttggagaatttggcataaagttgttccctttttaggagttccataactgaacgtaaatgttgttcgtgatccgccttagatttagaataaataaggatgtcgtcgatgaagacgatgacgaatttatcaagaaatggtttgcaaacccggttcataaggtccatgaaaactgcaggtgcgttggttaaaccgaatggcataaccatgaattcgtaatgaccgtatcgtgtgcgaaatgcggttttgggaatatcttcttcttgaatacgaattgatgataaccagaacgaagatcgatcttggagaaacaagaagaaccttgaagttgatcaaaaaggtcgtcgatacgcggtagtggataacggttcttgatggtaagtttattaagttcacgatagtcgatacacatgcgaaaagaaccgtctttctttttgacaaacaacacaggtgcaccccatggagaaacgctcggacgaataaaccctttatcggacagttcttgaagttgactagcaagctcttgcatctcagagggagctagtcgataaggggatttagcaacgggattagcaccaggaacaagatcgattcgaaattcaacagctcgcgcgggaggtagtccaggtagatcctcgggaaaaacctcgggaaaatccttgacgacgggaatttcctcgagtttcttcgctttgagtttcttatcaacgatgtgcgcgagaaacgcgatatagtttttgcgtaggtatttcctagcaacagtgcaagacatgagttttagaccacgagacggtttttcaccgtagacgttaagcatttctccgttcgatagtggaatacgaatgtatttttccgcgcaaaataatttcggctcgatgttgtgttagccaatccattccgataataacgtcgaagcttccaagttgcatggggagaagatcaacataaaatacgtgcttgtttaaatttaatggaactcgtggtaaaacagattgtatggataccgaatttccgtccgctacttctaccacgtaaggttcttttaattttgttcgtgttttagcaagtaatttttcaaattcgaacgaaacgaaactcttatctgctccagtatcaaataatatagatgcgtaaatagtgtcgactagaaatgtaccgttcacaacgtcgttgtttgcttgtgcttcgtttgcgttgacattgaacacacggcccctaggtggtggtaaagcaagaggttgttgttgttgttgttgtggagcaccaagttgtggacactgattacgcatgtgtccagggataccgcagttgtaacagacgggaccttgaatcatgatttgaggtgctaaatgattttgcaccatgtttcgatttgtttgatgattttgattcgtcggtgcccgattagacctacacacctctcgagtgtgtccaagtcgtccacagttgttgcatgaacggcaagccagatgagtaggatgatgtttcaaacaccgtgtacactgtggttgaaatcctcgatattgactcggcacgggattcgcgttttgcacaggaacctggttgatcggtaccggtgtagccggcgttgttggggcggtaacagcgaagtttcgtgcctttctcttacggttacgttgagcagacgatgattctcctggtgttgtagtaacaacgggtacagacgaccctgcctcagtcttcacagtctcggtggtggcgtttttcttggtacccttacgaaataaagtaccagccttaacatgattctcggttaaagtggaagccaatcgaaccgcggcttccatcgaagcaggataaaccgacaccaccgaatcttgaatttgtggtgggaggccgtcagtgtacagttcgatttgttttgtaacggatgtaacgatatcgggacataacagactgagctcgtagaatcgtttggtatatgcttcactttccccactatcttgtttgatgttttggatttcgtgctcgagtttctttatttcgcttcgcgggcaaaatctccttgacattatcgctttgaattgggaccacggtaatgccacggcttcttcagcaccgcgttgtctttgctccccattccaccacgtaagagcactatttcggagcatacccgaggcatactcgacccttagttcatcggggcatttgctatggatgaacgtgttttcaatggactcaaaccactgaagcatcgacacagcaccatcctcaccagtaaacttttcaggatcgcatgttttgaagtgcttatacgtgcagaacggtggcgcgccgttttcgttgttgttgttattgttgttgttattgttgttgttttcgttgatgttttgagtcaactgagccacaagaccaggtagaacagcagccagttgctcagagatgatacgagccatcttctcactcttggattcacgggcggccattctaaataaaattttaaggaaagtttagtttaatacgagtgagtgaaattcacagaataataacgagatacgatttagacgaggcttatggatggtaaccggtaatggttacagttgacacctcaaagtgtgtaaagtttctttcaacaacggtygmscacakgttttagcctataagtgaccactctctctcaagaatacccaggtaagcacaacaagtccctcggttgattgggatatatgcgaagtgctagccttagacagtaaacttgtgatacaggcggtcacccttccagattacatgtgtccacgttgtatcgaaaaactttaaaactttgatgagatcttcattttagaatgaaccgtttggtccaaagagaaataaaaatcctttttatttggtccaatcctaagggtacacgatatgataagtagatatataatagtatacatatttatacaagtaacacgtatagaaaacaagtagcatgtataaaaagcaagtagcatgtgaacacgtatgtttgatttcatgcaagcaacggttatagattagattacctttctaataacctaattccctataaccacggctctgataccaatctgtcacaccctgccggtggcggaaaacaccggcgtgacgtagtgattgttcggaaactcaatggtttatattaaatgtttcataattgcattttaagtcacgattaaattcgtctaatacaaataatccaaatnaaaaagtctcacatgcgagatttcaaaatgttcaatcataataaaaagaattaaacaaaaacatccaagcagttaatcacgcaatccttaacttcatttattccctgaaacgcacataaacaaaacaagtgtcaactacaaaagtagttggtgagaatacaacgagtttataaagttatgcatgagtttacaaagatttagttatgatcataagtcctgatagaataaaccgttagtgtaatctcaacatgtaaactactattgatcaagcctt

SEQ ID NO: 148 - protein, 513 aa, Stevia rebaudiana
MDAVTGLLTVPATAITIGGTAVALAVALIFWYLKSYTSARRSQSNHLPRVPEVPGVPLLGNLLQLKEKKPYMTFTRWAATYGPIYSIKTGATSMVVVSSNEIAKEALVTRFQSISTRNLSKALKVLTADKTMVAMSDYDDYHKTVKRHILTAVLGPNAQKKHRIHRDIMMDNISTQLHEFVKNNPEQEEVDLRKIFQSELFGLAMRQALGKDVESLYVEDLKITMNRDEIFQVLVVDPMMGAIDVDWRDFFPYLKWVPNKKFENTIQQMYIRREAVMKSLIKEHKKRIASGEKLNSYIDYLLSEAQTLTDQQLLMSLWEPIIESSDTTMVTTEWAMYELAKNPKLQDRLYRDIKSVCGSEKITEEHLSQLPYITAIFHETLRRHSPVPIIPLRHVHEDTVLGGYHVPAGTELAVNIYGCNMDKNVWENPEEWNPERFMKENETIDFQKTMAFGGGKRVCAGSLQALLTASIGIGRMVQEFEWKLKDMTQEEVNTIGLTTQMLRPLRAIIKPRI

SEQ ID NO: 149 - DNA, 17968 bp, Stevia rebaudiana
gatcataaacgaaaccaatacttccaaccaaagtatatacacaaaaacaaagcaaacaacaaataattacatatctatattagaaaaaataaaatgacgagaatgaacccatatcatagttcgtcttttagcgtgatttgtcacccgaaggaaccaaagaatcttgatttccttcactagattctccaacgatgtatgcttgttttcaaagatactcacattaagagaggttaaatacaccgcgtgaaccatcttcttccatctttgcgaactacgacctatccgtcgaatatccacaatatcacggatactaaacacaaacaaaggagtgatatgaaaacaacaagaaacgatctcccaaaccgatccagtcaaaccgcaagaaatgaaaatgtgctcggcagactcaatatgtgtaccgcaaaaagcacataaacttgactccatttgaatatttctaatgatcaatgcatcttttataggcaatctatctaattcagcacaccacgttgaaaaattaacatttttatgaatccaattattccaaaggaaggaatgggatggaaccggctgagaattagaatgcatagccactttaatacttttgattgagaacatataataatacttttgactgagaaaatataatctttaaaagtctgccacttccaaatgtctttacccaactcaacttgaaccgtatatagaagattggtaagagcattcaattccaaattatcaacaattgatagggaagacgcagaccaatgaaacagtaatcttaaattgtcatcactctcgcgctctatgcgatctaccaccgagcaacccttgaatgcttcaatcaagaggagggcagggtaacactcgcgaagaggaacttgaccaatccaaacatccagccaaaacccgatattaattttggtgttcgagaaaccgatgatagccatacgaatatcaatgccggcaagagaaagatccccgacatttgattgaaattaaaaaatgccagtataataattttcagattataaacattaatcatcaaatcaatagtagcatcttaataactgtgtttatatatatgcatgttcaattcatatgtcttctcacacattgttacccaatacttycctagctattcatgtgtgcttgtttattgtttacatattacaaacataaaaaattattcatgttcaggttatttgtatggttaaaccgaatamcaatcacaaacaaaccccttcttcatggtcgttttgtccatatacaacttcaagttgatggttcaaaatcaggattccctttaggttagggaagtagtttttgattttgtcttgtctccactcaattatatttcaattgatccttcgagataaataatcatatatataaatttctattatatatttttgcactgtcacgccaatttttaaatatctatattattttaatctttttagttatatgttacccttcaaaatcgtttttttcacaaggcattaggtgatttctttttaaatggatgatttgaaatagttacaataaaaatgagtgattttttattttgtttaattttttttgactaatctataataaatcttttgcttttatatttttattcaataaacctatgtttaataggagctaaaagaatcacctaaaaagttaagagtgaaataagaagctttataaaaacaaacgttaaagaaaaacaaaatgacttcatctaacttagcataactcattaacacacataagacttattatggtcacaatggtcatttagtgtgtgaaccctctcgccgggctccacccggccggtaccggaaacacatgcaatgcggaagcgtgatacatttattacaatacaaaccttttacaatatttacaatgtacaattttttggaataaattaaaacttttataatctacaacggtaacctaacacctgccaggtgtcactggtcggctttcctcgtatgctggttttattagacacgtagatgatcgtacggatcaaggagttgtataaaagtttttaggggttaccgtgacaatggcattcgcatcggaaaatccaaacgggttcagaaactacgaacacgaggaaagccaattagtgagatgtggcagatgttaggttacgttgtagattattaaagttttaatttattctgaaaaattttaccttgtaaatattgtaaaaggtttgtattataatagatgtatcacgctttcgcaatgcacgtgtttctagtacccaccaggaggcgcccaacgacgagtgtcacgtttaggtaaccctccaagaaagattttacatataaggggagacggagtggggctcgggaacattcgggaaacaagatttttggatgggaccgattgggaataccacccttcggattcaggacgaggtgggtcggggagtacacagcggacgttaccgaacgtgggaagaagaaaagcaaggggacatggggaagttgtgaaagtgagatgacaccgcgtaaaatagtaaaaatcgaggaaagctgatgtgacgctgatgtgaaagcggggaagagtaagtaacccagaacgactccgtgtggtctgatatgttcgtttattaagtagactagagaattatttactttcatgatattaacaaactataaaaagtcatataaaaaggaaatgtgctcaactaaaatgaggtgaaaataactttttaatcgaaaaaccacgcgagttattatttgcttttttttaattattaaatgtaatagcgtcaatcaaactcaaatcttatttaaatacaacctcaagcccaaacttcaaagaatactccactagtcaccgccattattgtctctcttgccgtcgacaaaatggatgccgtcaccggtttgctgacagttccggcaaccgcaataaccatcggcggtacggccgtcgcactcgccgtcgctctgatattctggtacctcaaaagctacacatctgcacgcaggagccaatcaaaccatctccctcgggttcccggtactcttctatacccaaatatctggatctgtgttattgattctcactagcaaatagatcgaaattcttcatttttaatgcaaaattgacctgcttaaaatcaagaggtgttgttttcatctggtttaggaccacatgccctacactggttatgtgattaatgatgtgtgtaatcaaatttttcagaggtacctggtgtgccattattggggaatttattgcagttgaaggagaagaaaccttacatgacttttacaagatgggcggcaacttatggtccgatttattcgattaaaaccggagcaacttctatggtggtcgtcagttcaaatgaaattgcaaaggaggtaagaacatagttctccctttttttttctgttttttaattatcaaacaataaataaagagctcgaatccaatgaaagcatgaaacatgaaacatttgagataataaacacaattaaggtcgatttaaacaattaaggtcaactaaattttaacccaaataaatcgtaaattgcgggtgtatagtgaatacgtgaagcggttttgtaatttgttacgagagtgagattattagaaaagattcccattgccggctgattatgattcttcgtaataattttgcacaaacgacaacggtgacaaattctgacttaaaatgaatattataatcacttacacgtaacatatttaataatttattaatctttgactcgatcaaaaattgggagtgtgtaggtgaagaaagctataatttaattatttaacgattgagcaccaaacgcatcttataaactactagatctattcgatgtcattgatatgataaaaaaatgtaattatattttaaacgtaaaataataatttcataaacagcgttgactttcgctttacgatccaagagattttaatatatttttgaaaagaaatatatttctaacaggtggatcgagtatgttaattctaagtactacaaaccggaagttcaagattaggttaattttattttattatatttttgaaacaccctaaactacaaactactcctaatcgatttggtttgaaccgagatggctttcaaagagtacctaccatcccaaaagacaaacttttttattttattttgtttatttatttttttaacatatttgcgagtcaaattgtaaaattcaataatttggaaattagttattgcattaactaatatcaggttatatgtaaagaatttgtatcgctggaaaattattaggttacgtgtactggttttataattaaattgacatgtagatgcaaataggcaaaaaccatttaactgaacacatattttatttaggtgtgttgattttaactaaacattaatatctttacattgaataaaattattaaaattgaaattattaagaaatgtattaaatttaaattgtgtttaacatcggttaagaacttgactaaaaatcaatggcgcctcttcaatgatgatcacgtaatggtttaacacaccaaattcatttttgacgctcataataggctccactacgcccagtcttaccgaagttgagatcatgtggccatcaatggtcatgatttcggatcttacatcgataaaaattataaataaaaaaatgtacagaacttgtgacatgattgtgataatgctattctttttcaggcattggttaccagatttcaatctatctcaaccagaaacctatcaaaggcattaaaggttctcacagcagataaaaccatggtggcgatgagtgattatgatgattatcataagactgtcaaacgccatatactcaccgctgttttgggaccaaatgctcaggtttttctaattaaattgtgtgtaattgatactcttttaagttctcattttgaaattttgatgtatgttttcagaagaaacaccgcatccatagggacatcatgatggataatatatcaacccaacttcatgaatttgttaaaaataatcctgaacaagaggaagtggatctaaggaaaatattccaatccgaactttttggattagctatgagacaagtgagtttgcatcttatatttaactactaattgataattaattaactagtttaaatagttgtgtattacatgagttaaataaaaataatactttattgtaaagtagtgaaataagaaatagagtatcaaaataaaagaacattacatatgaaatattttaaaataagagaagcgggaaaatgatatgtctggttttaaatcgtgactttattgtaatcgttatgcttttggttttgtataaaaaaaataaaaaatttatcaaccaatcagaatataccaatcgtgacatgtagcgcaaaagttatttatttattagatataaatatttaaaacaatttatttttcatttatattttctcaggcattgggaaaggatgtggagagcttatatgttgaggatcttaaaatcaccatgaaccgagatgagatatttcaggtattggttgttgacccgatgatgggtgcaattgacgttgactggagagatttcttcccgtatctaaagtgggtcccgaataaaaagtttgaaaacacgatccaacaaatgtatatccggagagaagctgtgatgaagtctcttattaaagaaaataaaaaacgtattgcatccggagaggtaattgataaatgaaatattgatgtaattcatagatttttaacctagcttgctaattaagttcaattgactttagaatataaattaacactttttatatcttaaaaaaaacagaaattaaacagctacattgattacttgctatcggaagcacaaacgttaaccgatcaacaactacttatgtctctatgggaacctattattgaatcatcagacaccactatggttacaactgaatgggctatgtatgaactcgcaaaaaaccccaaacttcaggtttgtattgttctttaaaaccaacaaatattagaagttaaaatcaatacttgcatataaaaatgtaaccaacttcaataaatatgatttaaggtaattacaaaagttagccggttttttgcaccaagttagaaacaaaagtcaacatggtcaaaagtaaagtcacaacccaacttaaaacatgtaatgaatgatatatggtttaccataatctgctgttatttattttgtgatctaattattatctaattaactcgatcaggatcgtttgtatcgggatatcaaaagtgtttgcgggtcagagaagattacagaagaacacttgtctcaactgccatacataactgccatttttcatgaaaccttaagaaggcatagtccagttcctataattccattaagacacgtgcatgaagacacagttttaggagggtaccatgtgccagctggaaccgaggttgactttttaaataagtcaaacatatgatttttttgttattatatgaccggactgtacgttgtgtttattaatttgtagctagcggtaaacatttatggatgtaacatggataagaatgtgtgggagaatcctgaagaatggaatccagagagattcatgaaggaaaatgaaacgatagatttccagaaaacaatggcgtttggaggtggaaagcgcgtatgtgctggttcgcttcaagcattgttgactgcttccattggaattggaagaatggtgcaagagtttgagtggaaactgaaagatatgacccaagaagaagttaatacgattgggcttactacccagatgcttcgtccactgcgggccataataaagcccaggatatgatcgcgggtgtattgctaaaacctatcgatgcgtttaaccaataaatatcgtttagcggtttgtattttgttaagtgtttagttgctggagactttgaatgtatgtgacttggtatcttttatcataagttttagtttggtgtgtttatgccaacaacttcgacaagttgtcagacttgtgttgaatataatcaaaaccagaatcgattaaaacaaactagttaggaatatatctatgggccgtgggttttgggttgtggatgtttatttttatactaacaaaatttagcataataatacccgaataattttaaagttattacataaaacacattttataaaataaattaaattatattaggttcaatggatcaacccatgaacctttctggttgacaccatgaagaccagtttagttaaatgtgttcacaatatattgacccgaaaccgttcacgctcctaccttggaaataagtttcacttttgtttggaaacatgctcgaagaggaagaggatgtatagattaacaaagtcacatattcccaagttagtttagtttacgatttagtaagatgccttatatcggtgtgtataattccaaactacaaacagagtgaaaatatcatgggctttgcccacctagattaacccatccagttgtctcctatgttgaagatgtaaataaaattaacgacttaacattttagtgtataaattagaccatgtataatactgatcacactcttcatttcttcaccgttttacttttctgtcaccacccccacactttcccgccaacctatgtaatacattactcactctcaaccctctccacttttatttcttagtaatttttatttaaaaaagtgaaacttgactaaaatcaaaacaacaataaccaaaattcaaaccaagttcaataaaattaaatagcaataaataaaattcaaacaagtataattaaaaaacaattaaactagaaaagcgggatgatgtttcacaatgtctcacacttcgacattcactgtcggtacgccccgttatcctttggtaatcgggaatagactgctttcgaatgtcgttctccgtccaaccgtcttcaaggttgtctcgaactcgcttttctggtgtactgaacaagcttgttcggttcctcaaatcacgccatttattactcacttgatgacccatatgagtttcgtcttcgggggcatcgagtaggaaaagccgatgaacttgatcccagaacgggatacgaaggaacatcggtttcgagctttcattgacgagaatccaagcccgtgccaaatggacctcctcctcacggatgcacctccttgaactcatttttttaaatgtttggttgaaaagagagtattttataagtttgtgagattgtaagatgaataaaataagaggacaaggttattcgtataggtaaaatatatatatttttcaattacatagtcgttgaatgattttttttaattcaaagggcgggcacgtggcccaatcaaaagggggatgggtgggcggggttcagggttggggatagggcgttgttcctatcggctacccgcgatccatgtcatctccccgctatgggtagggcaagtattacacccagccttagaagttgttatcacacgattgctaagtcaaccttagaaggcgaaattcatcaataagctctgggtttagttgaaaattggaatatcaatcgggtcaaaaggaatagcaaatcttctggaattgtttgataatacaagcatgtagtttgttagcattgttttttttttgtccttcttcactaatgggaccgtacccccagataagcgagaaaccggatagaatccgtaaacctctcccctcctcaggtttgaaccagtgacctctatccaacaatacactttcttcccatcaccgaaaattgcccagagcaatgctctagacaagatttgaacctgagaccacccaaagagagagcctacacacctcatcctaaccacttgagctagagagaacttaccgatgattctttaaggatacggatgtagaacgcatttgtggaactgatggaggcatccttcttctttattgcttatttactccagtcattcaaccttcaataccagagattaaggttacgatttcaataagcaatccaaaaacattgaatttgaattgtcagcgggagaagaagagatggggtagaattcgtgatagagatgaatgaaattagggtttaccgaaaattgaagagaaaaccccgtgtgtgtaatccctttcgggtttgggtttgcgccggattaaaaacagacatgtatggaacatattttgtaaatgaaaattgaaggttaattgtgagcttgaccttccaatgtggaggtcatactaggggcaagtttaaatggacaccaagtgaagggccaacttgggatttaacccaggttcggttccgatgggggcgaggggttacctattccacggggatcccgcgcatcaggggggcgtctgtttcaccgttgcccggtgggcccggttcagacaacgtacgtggtacgtgaaaacaacgtcgttcaaaaaaaattgtcagcttgacacgtgtatgatacttcctgttcaaaaagaaaaaatttgtgagcttgaccatgtatgaaacttaggtcacacggtgtcctcccaatcctccccacttctcctcactgccacatcagcgccacatcagcttttcctatttttttctatttcactggcaatcgtcccacttttccccacttttctcacttttccacctcatcacatatttaatattaattttaattattctttttttttttaacataaaaaaaaagactttcatttattaaaataaaaaaaatacaacttaataaaaaaaaacatacgagttaataaaaacaacgaaaaaaatacaactactcattcgcatgattggcatgccattcttgataaaaatgctcaaaatgctcgatgaggtcggcacgaagattgtcgtgagttgtgtgtgatcgtatttggctccaaatatctggttctggaagttcttcacttagggggtcttctatgtgatcgggtgatattacttgacccgttgccttcaaaatcatgttatgtaggatgatacacgtgtacatgatttttcttaattttcgtggatgcatttgttttgccggatagtttaggatgtgtcattttccttttagaacaccaaaggctcgctccatgtccttacgtgccgcttcttgtgccttcttgaagcgctggcgtttcaaatcatcctcagacagatcaccaaagcttttcacaacagtagccccaactaggataaataccatcgcaaagatagtacccaaacttgtattgcacaccgttaactataaatggtcattttggggccctaccatcaacatagttgttgaataaccatgaaccggtcaagtmcgtttctgtcgtkgttcgcctaggtgttccaaaatacgaatgccaaaaccataaatcttgtgaggcaaccgcttcaagcatcactgtgggaaccttgcaatcaccacgtgtatattgtcctctccattcaaacggacaatttttccacttccaatgtgtacaatctaggctaccaagcatcccacggaatttgtgtcttgtatcatgtgcttggtataacaattgaatatcatgataagtcggccttcggaggaattcctttttatacaaagcaacgacaccgtcacaaaagtagttgagactatcacgtgccgttctctcggacatccgcaaaaactcatctagagaatctggacaattaccatacgctaattgtctgatagcagacgtgcacttttgaagtgccgtaaaactctgatgacatcttgcatcataaattgtttgaaaccattcgtagttcatttctatgtcttcaatgatttttaaaaataattcttttggcatacgaaatctccttgaaaacattttcagggtgtatgttgcgtttgaatcatcaaaatattggccaaacagacgtttgtgtgatttttcacgatagtcacgacgtatatatctttaaaaaaaataaatacaaatataaatatagatgaatataaaaacaaaaaaatcgtaatttttatgtgagtttactaacattcttgaagaggaacccgtcgattgggaattcatttgtaaacccgcggatacaacgcaagttaaatactcgtaatttcgccgtctaacttcgtcctcttcatcttcggaactggacgattcgtattggctaaacggctcttcggaactggaagaatcgtgttggcgaaacggctccatttttgttcaaagtgtatttggtgaaaatattaagaatatagaagagaattgtagagagaatttgaagaaagtgtgaaaatttaagggtttaaaagtgggtttatataaaatttgaaaactttttttttttagggtccamsggatctatttttcttccccaacggatctatttttcttccccatattcggtgagtctcgctgccaattccccgaaaaagagaaccccgaaatcgaggggcctgtgttcccgatcggggccgaccctccccgactcctctcccgaaacacaccgtgtgaccttatgtggctcttatgttattttacgtatttttaattattagacaaatcatttacttcatatataaaaaaatcatataaaaaagaaatgtgctcaagtaatatgaggtaaaaataactatttatctaaaaaccacgtgaattatcatttgatatttctttattacgtgtaataagctagcgtcgatcaaactcaaaatcttatttaataccacctcaagtccaaacttcaaagaatactccactcgtcaccgccattattgtctctctttccgttgacgaaatgaatgccgtcaccggtttgctgacagttccggcaaccgcaataaccaccggcggtacggccgtcgcactcgccgtcgcactgatattctggtacctcagaagctacacatctgcgcacaggagccaatcaaaccatctccctcgggttcccagtactcttctatacacaaatatctagatatgatctgtgtcattgttcatggattaatttatacattcaattcattgattgattcatcaaagttcttcattttttaatgcataattgacctgtttaaatcaattagaggtgttgttttcatctggtttaggaccacatgctcaacactagttatgtgattatggtgattaatgatgtgtttaattaaaatttacagaggtacctggagtgccattgttggggaatttattgcagttgaaggagaagaaaccttacaagacttttacaagatgggcggaaacttatggtccgatttattcaattagaaccggagcaactcctatggtggtggtcaattcgaatgaaattgcaaaggaggtacgaacgtagttctccatttttttttttctgcttttcagttatcaaaataagaaatatagaattcgaatccgcatgaaacatgaaacatgaaacatgagagatatagtaaactgtttatttgaatctataataaacacatcgaaggtcgatttaaacttgtaatcattaatgttattgktgaagtgagtttaagatcagttttcgttttaaacccaaataaatcgtaaactgggggtgtatagcgaatacgtggaagcggttttgtaattggttacgagactgagattattggaaaagactcggtcatacccggctgattatgaattaaagattcttcgtaataattttgcataaaatacaatttataaaagtcaaactctaagcaattctgaattaaaatacatattatattcaattactagtaacatatgtaataatttattaatctttgactcgataaaatatgtaagtgtgcaagtgacgaaagaaatagtttcataaactactagatctatacgatgtcattgatattataaaaagtaattaacgtaaaataatttcataaaaagcgttgacttttgttttgatagtcaaattgtaaaattcaatggcctatttggaaatcttaggatgtctcatgttcacctcttcctagagcataattgctttggatgctcgtgtaacaaggaaaagtgtacatcagataaagtcaccgttcaaacttgtcgaggagagatgatttacggattccaccgggttcccagttatctggatgtacggtctaacgaaggtcgatgaagatcaccttaaaaaatgttattaagtaatattaggttagatgtcttaaagattaatcatcgctgaaaacttattactgaatttgagatcatgtggccatcagtggtcatgatttcaagatcttccatcaatataataatttataaataaaaaaaatgttcagtacatgtgagttgtgacatgattatgataatgttaattaatctttttcattctttctttctaggaatttgttaccagatttcaatctatctcaaccaggaaaccatcaaaggcaatgatggttctctcaggtgataaaaccatggtggtgatgagtgattataatgattattacaagactgtcaaacgccatatattcaccgctgttttgggaccaaatgctcaggttaataatctaaatcaattatgtgttttcacatgcttaattgacactcttttaagttctcattttggatttttattgtaagttttcagaagaaacaccgcattcatagagacatgatgatggagaatatatcaacccaacttcatgaatttgttaaaaataatccagaacaagaagaagtggatttaaggaaaatattccaatccgaactttttggattagctatgagacaagtgagtttgcatcttatattcaactactaattgattattaaccaaattaattagtttaaaaagctctctattacacgagtcaataattaagaaacatattttatagtaagtgtaacacccggctccccggcccccggccggtccgggcagcggtcggtgttactaaccgggtcagttcaatggcaggatcgaatcaagcggtttataatgcgcaactcaattacaccaaacaaccttctcattcaatttacaacatcagagtgtattacatgcggaagcaaaatattacaatacattacaatacaaatattaaacagttatgatagcccaacgtcttgtccccttgatccagttttagatacctgagattacattcattgaaacgctcagctttcgctggtgagtccataggttttgataatcagaaaacctttggttagttcgttacagttcgttatacacataatcgttagtcaagtcatgatactgcattaatattacatcttgatattatctcataatattaacgttggcagcacttaatatccccatcttgatattatctcaggatattaagcaccgtaaccataatactagtggcaaactgaggatcagtcagtttccgatgtgttgttattaccatatctgtctggcaccgaaacccgatgagtcatgttgttgccccccatatgatttaccagatcatataatagagagtcaataatgcatgcgcgtgacggttaacgtcaactacggggccaccgcatggggtttatcagaccctgtagtactacccattattacccggccaaatgttaacggtccagaataggggcctttgagtggtatgagttcagctatgtaataacagagatagtattatcgtgaacaatgtaatcccaccccgtattgtaaaacaagtgaggtgacaaaaggggctatgtactcacctagtamctgtagaggagatgataataagaactaaggagagaagataactcgcgttcctggagcgtaaccacaacgagtcttgaatacgagagcggaatgagcgggaatccttccttggaagctatactgacccaagagagtgattttaagagtttaagatcgagagaatggaaraaaagtgtgagaaatcgactggattcgtggtttctatttataggcacgacattgggggtggtcgcgccacgcgaccgggaaggctccacccctcgcgtgccgcgagggggtggataagatcaatctgcgattcgtcggtcgctcgcgccacgcgactccggacagcgtcatctctcgcgtgccgcgagagatggaatgtcgtgttttggatagatttttgacttttggggccgatgactcaccttctagcactcaaaactggctacctagmctgccaccagccacattwagccttgccactgtaccctgggcacgtggcctagggtgccatgtgtcccgggggttcgtttcggggtccggtcagtgttttcggttatcagtaatcgtgtttcccgcttcgttaggataccgtttcgagcgcggtcttttcctatcttcattttgttacgttcccgcatctaaccccattggtttcatctccaaaggaaacgtcggggttttgagttgccagaacgttgtatcgtgtaacttttaaatcgtctttcaaattgaaattctgattatactcaaatgaatctaaattcggatatgaatataatgggattgtaatattgataacgatatcgagttatgattaggtgatgacgggtttttcaggtggtcaatgaccggaaattggccggtcaactgtcggaaaatgaccagttgtcacagtctccccatgttactgaaatttcgtcccgaaatttagagttagctattcctctccaggaatagatgttaacgcttctcatgattttggataactcggttagttgaggtttgaatcatcttgatttggaatagttatgacattcaccctccttcgaggtaatgtaggaacgtattaggtttctcgtatatccaactcagactaacttccccttatactgtcagtgtttatatatagggcgtatgtaggacaagtccagccaccagcccaccacacyttccagtacgtagaagtccatctttgttataaccactgatactctgatactcgaaaaatgcgtatcccagctgccgggtgaaatctactatacggggtcctgagtataactccaggggtttgtatagttcttttctgtttggcatcgaactgccgtttgaaatcttctatacggatcctgagtgtaactccaggggtttgtatagttcttttctgtttggcatcggtatgggaactgtgttcgcatttgagtatgtacttacgtttgttttgagtaacatttactagttactggcgttttccatactgtattgataacgtttcgaggcaaaaattctccgtaccccatgagttgatgaaactttgaaatgtggagaaccttctcctagtatatgctttcagtttgacactttgtattggcttcccatatgtccaacctggatatacttccatcataccgacagtgtttatatatagggcgtatgtagggcaaacccagccaccagcccaccacaccttcagtatatggaagtcaaacccatgttgacattcccgaagcgtgaatcgatttggaatcataatttggtatactaggtctttataacgttaatattacgtagtgaattacttaatagatacgaagctctttaccagctccgatgttaaacagaatgatagcaaattgtttgagaggaacatacccatgtcatggttggggatcattcctttccgcgtttgcttggatcataaataccctgccttgagccgtattgttggccgcgccaagctttgggcagttgcgtctgaagtgatctgttgcaccacattcgtaacaagttctttgattttgaggtacacctggtaaatttgtgcaattgttgggactatgtccgatttgattgcatctggtacatctgacttctttacaaagtccagtgtgatgatagttgcacttgtcgcatttaggcaggtttcctgtgtatccacccttcttgttctgagttactggaaatgatgatattggagtaggagatggatagttcggagagtcatcaaatttccgtttgtttgaccctgatggttcagaatgagatgctttaaattttccctgagcgaccgcttggtctctcagcgtgttggctatttctatcatttcagagacggacgatgctttggatgctgttaccatcccctggatttgttctagcaaacccatgatgtacatctgaaatctacggtactcgggtgtcaccatgtgtggacataacaaacaaaaattatgatatcgctcgttatagctggcgatatcatctccgatcattttgttattccagaattgttgatcgagtttctggagttcatttattggacagtacttgtctgtcatccgacgtttcaggtctgtccaagatatgctataggctgcgtcaatgcctaggttcttaaccagagaattccaccaagtcaaagctgatccttctagtgtacaagtagcaaattttgttttgtcaagttcactgcaatcacagattttctgaacttgttccatattctctacccattgcagtaatccgattgctccttctgtaccgcagaacttgtgcggctgacagctaagaaaggttttataggtgcacgcttgttttggtttttggggttcctgattagctcgcactagacgcaaagcgtcatgatcagctattgcttgtgctattaattgcgctattaattgcgcaacctgacctcggttcaggagttcttcatcatttggattgttgactggtgtttgttccatttctttctgacataaagaaacatatagtgaggtgaatcacacaaacaaatctcaacatagattaaatgataaagacagcaatcaataacaaaagagaaaccgtcatatatataaaggatatctgtttatatatacaatcaaaagatacaaatatcctatcaaaaggctagacgggtacaacccacccgtgggagatatcacaaaagatgtgggaatgttctgatctgagaaactatagtaattaagaacatgagtcgagctgtcacaacgactatcatctataactgttgattgaactccaacatccattgtcttagaagagagaaccgatgctcggttgaaacgagtcgagatgtgaactga

SEQ ID NO: 150 - protein, 513 aa, Stevia rebaudiana
MDAVTGLLTVPATAITIGGTAVALAVALIFWYLKSYTSARRSQSNHLPRVPEVPGVPLLGNLLQLKEKKPYMTFTRWAATYGPIYSIKTGATSMVVVSSNEIAKEALVTRFQSISTRNLSKALKVLTADKTMVAMSDYDDYHKTVKRHILTAVLGPNAQKKHRIHRDIMMDNISTQLHEFVKNNPEQEEVDLRKIFQSELFGLAMRQALGKDVESLYVEDLKITMNRDEIFQVLVVDPMMGAIDVDWRDFFPYLKWVPNKKFENTIQQMYIRREAVMKSLIKENKKRIASGEKLNSYIDYLLSEAQTLTDQQLLMSLWEPIIESSDTTMVTTEWAMYELAKNPKLQDRLYRDIKSVCGSEKITEEHLSQLPYITAIFHETLRRHSPVPIIPLRHVHEDTVLGGYHVPAGTELAVNIYGCNMDKNVWENPEEWNPERFMKENETIDFQKTMAFGGGKRVCAGSLQALLTASIGIGRMVQEFEWKLKDMTQEEVNTIGLTTQMLRPLRAIIKPRI

SEQ ID NO: 151 - DNA, 1645 bp, Stevia rebaudiana
gtcaccgccattattgtctctcttgccgtcgacaaaatggatgccgtcaccggtttgctgacagttccggcaaccgcaataaccatcggcggtacggccgtcgcactcgccgtcgctctgatattctggtacctcaaaagctacacatctgcacgcaggagccaatcaaaccatctccctcgggttcccgaggtacctggtgtgccattattggggaatttattgcagttgaaggagaagaaaccttacatgacttttacaagatgggcggcaacttatggtccgatttattcgattaaaaccggagcaacttctatggtggtcgtcagttcaaatgaaattgcaaaggaggcattggttaccagatttcaatctatctcaaccagaaacctatcaaaggcattaaaggttctcacagcagataaaaccatggtggcgatgagtgattatgatgattatcataagactgtcaaacgccatatactgaccgctgttttgggaccaaatgctcagaagaaacaccgcatccatagggacatcatgatggataatatatcaacccaacttcatgaatttgttaaaaataatcctgaacaagaggaagtggatctaaggaaaatattccaatccgaactttttggattagctatgagacaagcattgggaaaggatgtggagagcttatatgttgaggatcttaaaatcaccatgaaccgagacgagatatttcaggtattggttgttgacccgatgatgggtgcaattgacgtcgactggagagatttcttcccgtatctaaagtgggtcccgaataaaaagtttgaaaacacgatccaacaaatgtatatccggagagaagctgtgatgaagtctcttattaaagaacataaaaaacgtattgcatccggagagaaattaaacagctacattgattacttgctatcggaagcacaaacgttaaccgatcaacaactacttatgtctctatgggaacctattattgaatcatcagacaccactatggttacaactgaatgggctatgtatgaacttgcaaaaaaccccaaacttcaggatcgtttgtatcgggatatcaaaagtgtttgcgggtcagagaagattacagaagaacacttgtctcaactgccatacataactgccatttttcatgaaaccttgagaaggcatagtccagttcctataattccattaagacacgtgcatgaagacacagtgttaggagggtaccatgtgccagctggaaccgagctagcggtaaacatttatggatgtaacatggataagaatgtgtgggagaatcctgaagaatggaatccagagagattcatgaaggaaaatgaaacgatagatttccagaaaacaatggcgtttggaggtggaaagcgcgtatgtgctggttcgcttcaagcattgttgactgcttccattggaattggaagaatggtgcaagagtttgagtggaaactgaaagatatgacccaagaagaagttaatacgattgggcttacgacccagatgcttcgtccactgcgggccataataaagcccaggatatgatcgcgggtgtattgctaaaacctatcgatgcgtttaaccaataaatatcgtttagcggtttgtattt

SEQ ID NO: 152 - protein, 513 aa, Stevia rebaudiana; identical to SEQ ID NO: 148

SEQ ID NO: 153 - DNA, 1523 bp, Oryza sativa japonica
ggtcggccatggagtcgctgctcgcagccggtgcgggagggatcggtgtggcggcggcggccgtcggggggtttatcgcggcggcgacactcgccgtggcaccgcccaagtaccgccgcaacccgcctccagctgttcctggtttacccataatcggaaatctgcatcaattgaaagaaaagaagcctcatcagaccttcacaagatgggctgaaatttatggcccaatctacactataaggaccggggcttcttccgtagttgtgctcaattcaactgaagtagccaaggaggcgatggttgcaaaattctcatccatatctacccgaaagctatccaaagcactaacagtgcttagtcatgataaatccatggttgctaccagcgacagtggtgatttccacaaaatggggaagcgttatatcatgttaagcatgctgggtacttctgcacagaaacaatttcgtgacacaagagatatgatcatcaataacatgttaagcactttccatcaactggtgaaagatgacccacatgctcctctgatattcagagatgttttcaagaatgagctattccggttgtccatgatccagagcttaggagaggatgtgagttcagtctatgtggatgaatttgggagggacatttcgaaggaagaaatctacaatgctactgtgactgacatgatgatgtgcgcaattgaggtcgactggagagatttcttcccctacctcagctgggttccaaacaagagcttcgaaacaagagtgtttactacagaatctagacgaactgcggtgatgcgcgccttgatcaagcagcagaaggaaaggattgtgcgtggagaggcaaggacatgctatctggacttcttgctggcagagaacacactgacagatgagcaactaatgatgctagtgtgggaggcactcatagaggctgcagatactaccttggtcaccacagaatgggccatgtatgagcttgccaagaaccctgacaaacaggaacggctttaccaagagatccgggaggtgtgcggcgacgaggcggtcaccgaggagcacctgccgtggctgccgtacctcaatgccgtcttccaggagacgctgcgccgccactcccctgtcccgctcatacctccgaggttcgtcaacgaggacaccatgctcgccggctacgatgtccccgccggcaccgagatggtgatcaacctgtatgggtgcaacatgaacaagaaggagtgggagtcgccggaggagtgggcgccggagaggttcgccggtgggaggttcaaggtggcggacatgtacaagacgatggcgttcggcgccgggaggagggtctgcgcagggagcctgcaggcgactcacatcgcgtgcgccgccatcgcgcgcttcgtgcgggagtttgggtggaggctgagggagggtgacgaggagaaggtggacaccgtgcagctcaccgcctacaagctccacccgcttcatgtccacctcacgcgcagaggaaggatgtga

SEQ ID NO: 154 - protein, 504 aa, Oryza sativa japonica
MESLLAAGAGGIGVAAAAVGGFIAAATLAVAPPKYRRNPPPAVPGLPIIGNLHQLKEKKPHQTFTRWAEIYGPIYTIRTGASSVVVLNSTEVAKEAMVAKFSSISTRKLSKALTVLSHDKSMVATSDSGDFHKMGKRYIMLSMLGTSAQKQFRDTRDMIINNMLSTFHQLVKDDPHAPLIFRDVFKNELFRLSMIQSLGEDVSSVYVDEFGRDISKEEIYNATVTDMMMCAIEVDWRDFFPYLSWVPNKSFETRVFTTESRRTAVMRALIKQQKERIVRGEARTCYLDFLLAENTLTDEQLMMLVWEALIEAADTTLVTTEWAMYELAKNPDKQERLYQEIREVCGDEAVTEEHLPWLPYLNAVFQETLRRHSPVPLIPPRFVNEDTMLAGYDVPAGTEMVINLYGCNMNKKEWESPEEWAPERFAGGRFKVADMYKTMAFGAGRRVCAGSLQATHIACAAIARFVREFGWRLREGDEEKVDTVQLTAYKLHPLHVHLTRRGRM

SEQ ID NO: 155 - DNA, 1534 bp, Oryza sativa japonica
gcacagcgtgtgatccatggaggcgttcgtgccgggcggcgcgggggtggcggcggcggcggtcggagggttcgtcgccgcggccgcgctagccgagagggccggcgtgatcgcgccaaggaaacgccccaacgcgcccccagctgttcctggtttacccattatcggaaatctgcatcaactgaaagaaaagaagcctcatcagacctttgcaaaatgggctgaaatttacgggccaatctacactataagaaccggggcttcttctgtagttgtgctcaattcaactgaagtagccaaggaggcgatggttgcaaaattctcatccatatctacccgaaagctatccaaagcactgacagtgcttactcgtgataaatccatggttgctaccagcgactattgtgatttccacaaaatggtgaagcgttatgtcatgtcaagcatgttgggtacttctgcacagaaacaatttcgtgacataagagatatgatgatccataacatgttaagcacttttcataaactggtgaaagatgacccacatgctcctctgatattcagagatgttttcaaggatgagctattccggttgtccatgatccagagcttaggagaggatgtgagttcagtctatgtggatgaatttgggagggacatttcgagggaagaaatctacaatgctactgtgaccgacatgatgatgtgcgcaattgaggtcgactggagagatttcttcccctacctcagctgggttccaaacaagagcttcgaaacaagagtgtttactacagaaactagacgaactgcggtgatgcgcgccttgatcaagcagcagaaggaaaggattgtgcgtggagaggcaaagacatgctatctggacttcttgctggcagagaacacactgacagatgagcaactgatgatgctagtgtgggaggcactcatagaggctgcagatactaccttggtcaccacagaatgggccatgtatgagcttgccaagaaccctgacaaacaggaacggctttaccaagagatccgggaggtgtgcggcgacgagacggtcaccgaggagcacctcccacggctgccgtacctcaacgccgtcttccacgagacgctgcgccgccactcccctgtcccgctcatacctccgaggttcgtccacgaggacaccaagctcgctggctacgacgtccccgccggcaccgagatggtgatcaacctgtacgggtgcaacatgaacaggaaggagtgggagtcgccggaggagtgggtgccggagaggttcgccggcgggaggctcgaggtggcggacatgtacaagacgatggcgttcggcgccgggaggagggcctgcgcggggagcctgcaggcgactcacatcgcgtgcgccgccgtcgcgcgcttcgtgcaggagttcgggtggaggctgagggagggtgacgaggagaaggtggacaccgtgcagctcaccgcctacaagctccacccgcttcatgtccacctcacgcgcagaggaaggatgtga

SEQ ID NO: 156 - protein, 505 aa, Oryza sativa japonica
MEAFVPGGAGVAAAAVGGFVAAAALAERAGVIAPRKRPNAPPAVPGLPIIGNLHQLKEKKPHQTFAKWAEIYGPIYTIRTGASSVVVLNSTEVAKEAMVAKFSSISTRKLSKALTVLTRDKSMVATSDYCDFHKMVKRYVMSSMLGTSAQKQFRDIRDMMIHNMLSTFHKLVKDDPHAPLIFRDVFKDELFRLSMIQSLGEDVSSVYVDEFGRDISREEIYNATVTDMMMCAIEVDWRDFFPYLSWVPNKSFETRVFTTETRRTAVMRALIKQQKERIVRGEAKTCYLDFLLAENTLTDEQLMMLVWEALIEAADTTLVTTEWAMYELAKNPDKQERLYQEIREVCGDETVTEEHLPRLPYLNAVFHETLRRHSPVPLIPPRFVHEDTKLAGYDVPAGTEMVINLYGCNMNRKEWESPEEWVPERFAGGRLEVADMYKTMAFGAGRRACAGSLQATHIACAAVARFVQEFGWRLREGDEEKVDTVQLTAYKLHPLHVHLTRRGRM

SEQ ID NO: 157 - DNA, 1539 bp, Oryza sativa japonica
gcagtgaacctgtgtgatcgatcggccatggagtcgctgctcgcagccggtgcgggagggatcggcgtggctgcggcggccgccgtcgtggcggcgaccctcgccgtggtgccgcccaaggaccgcggcaacaacccgcctccagctgatcctggtttacccgttattggaaatatgcatcaattgaaagaaaagaagcctcatcatacctttacaaaatggtctaaaacttatgggccaatctacactataaagaccggggcttcttcagtagttgtgctcaattcaacggaagtagccaaggaggcgatgattgaaaaattctcatcaatatcaactaaaaagctaccaaaagcattgtctgtgataagccgtaaaaacatggtttccatcagcgactatggtgacttctataagatggcgaagcgtaatattatgctcgcaattttaggttttaatgcgcagaaacgcttctgcgatacaagagaaaggatggtcagtaacgtgttaagcagtttgcataaattggttgctgttgacccacattcccctctgaacttcagagaagtttacactactgagctattcggattgtccttgatccagaatttaggtgaggatgtgtgttcagtttatgtggaagagtttgggagggagatatccaaggaagagatcttccatgtccttgtgcatgagatattgtcgtgtgtcgtggagcctgattggagggactacttcccctacctcagctggcttccaaacaagagcttcgaaacaatagtgtctagtacagaatttagacgagatgctgtgatgaacgcgttgatcaagaggcagaaggaaaggattgcgcgcggagaggcaaggatatcctatattgacttcttgctggaagctaagaacagtacacagctgacagatcaccaactgatgctgctgctggcggagtccatcgctgctgctgtggatactgtcctggtaaccactgaatgggccatgtatgagcttgccaagaaccctgacaaacaggaatggctttaccgggagattcgagaggtgtgcggcggcaaggcggtgaccgaggaggacctaccaaggctgccgtacctcgacgccgtgctccacgagacgctgcggctgcactccccggtgccggtgctccccacgaggttcgtccacgacgacaccacgctcgccggctacgacgtccccgcgggtacccaggtgatgatcaacgtgttcgggtgccacatggacgaggaggcctgggagtcgcccggagagtggtcgccggagagattcctcggcgaggggttcaagttggccgacaggtacaagacgctggcgttcggcgccgggaggaggacctgcgcggggagccagcaggcggtgagcatcgcgtgcgtcgccatcgcgcgcttcgtgcaggagctccagtggacgctgagggagggcgacggtgataaggaggataccacgcagtacactgccttgaagcttcacccgctgcacgtgcacctcaagcccagaggaagctag

SEQ ID NO: 158 - protein, 503 aa, Oryza sativa japonica
MESLLAAGAGGIGVAAAAAVVAATLAVVPPKDRGNNPPPADPGLPVIGNMHQLKEKKPHHTFTKWSKTYGPIYTIKTGASSVVVLNSTEVAKEAMIEKFSSISTKKLPKALSVISRKNMVSISDYGDFYKMAKRNIMLAILGFNAQKRFCDTRERMVSNVLSSLHKLVAVDPHSPLNFREVYTTELFGLSLIQNLGEDVCSVYVEEFGREISKEEIFHVLVHEILSCVVEPDWRDYFPYLSWLPNKSFETIVSSTEFRRDAVMNALIKRQKERIARGEARISYIDFLLEAKNSTQLTDHQLMLLLAESIAAAVDTVLVTTEWAMYELAKNPDKQEWLYREIREVCGGKAVTEEDLPRLPYLDAVLHETLRLHSPVPVLPTRFVHDDTTLAGYDVPAGTQVMINVFGCHMDEEAWESPGEWSPERFLGEGFKLADRYKTLAFGAGRRTCAGSQQAVSIACVAIARFVQELQWTLREGDGDKEDTTQYTALKLHPLHVHLKPRGS

SEQ ID NO: 159 - DNA, 1533 bp, Oryza sativa japonica
atggagtcgatgctcgtagccggagcgggcgcggcggcggtggcggccgtcgggggcctcgtcgcggcggccgcgctcgccgacaagctcgtcgcggcgccgccgccgcgcaagaaccgcgccaacccgcctccagctgttcctggtttacccattattggaaatctgcatcaattgaaagaaaagaagcctcatcagacgtttgcaaaatggtctgaaacttatggaccaatctacactataaagaccggagcttctccagtggttgtgctcaattcaactgaagtagccaaggaggcgatgattgacaaattctcatccatatctactcgaaagctaccaaaagcaatgtctgtgctaactcgtgaaagtatggtcgcaatcagcgactacggtgactaccaaaagatggcgaagcgtaatattatgattggcatgttaggttttaatgcacagaaacagtttcgcggtacaagagagaggatgatcagtaacgtgttaagcactttgcataagttggtttctcttgacccacattcccctctgaacttcagggatgtttacattaatgagctgttcagcttgtccttgattcagagtttaggtgaggatgtgagttcagtttatgtggaagagtttgggagggagatacccaaggacgaaatctttgatgtccttgtgcatgagatgatgatgtgtgcagttgaggctgactggagggactacttcccctacctcagctggcttccaaacaagagcttcgacacaattgtgtccactacagaattcagacgagatgctatcatgaatgcattgatcaagaagcagaaggagaggattgcacgcggagaggcaagggcatcctacattgacttcttgctggaagctgagaggagtgcacagctgacagatgaccaactgatgctgctgctgtcggagtccatcctggctgcagctgatactgtcctggtgaccaccgaatggaccatgtatgagattgccaagaaccctgacaaacaggagctactctaccaagagatccgagaggcgtgcggcggcgaggcggtgaccgaggacgacttgccgcggctgccgtacctcaacgccgtgttccacgagacgctgcggctgcactccccggtgccggtgctgcccccgaggttcgtccacgacgacaccacgctcgccggctacgacatcgcggcgggcacccagatgatgatcaacgtgtacgcgtgccacatggacgagaaggtgtgggagtcgccgggggagtggtcgccggagaggttcctcggcgaggggttcgaggtggcggacaggtacaagacgatggcgttcggcgccgggaggaggacctgcgcggggagcctgcaggcgatgaacatcgcgtgcgtcgccgtggcgcgcctcgtgcaggagctcgagtggaggctgagggagggcgacggggacaaggaggacaccatgcagttcaccgccttgaagcttgacccgctgcatgtccacctcaagcccagaggaaggatgtga

SEQ ID NO: 160 - protein, 510 aa, Oryza sativa japonica
MESMLVAGAGAAAVAAVGGLVAAAALADKLVAAPPPRKNRANPPPAVPGLPIIGNLHQLKEKKPHQTFAKWSETYGPIYTIKTGASPVVVLNSTEVAKEAMIDKFSSISTRKLPKAMSVLTRESMVAISDYGDYQKMAKRNIMIGMLGFNAQKQFRGTRERMISNVLSTLHKLVSLDPHSPLNFRDVYINELFSLSLIQSLGEDVSSVYVEEFGREIPKDEIFDVLVHEMMMCAVEADWRDYFPYLSWLPNKSFDTIVSTTEFRRDAIMNALIKKQKERIARGEARASYIDFLLEAERSAQLTDDQLMLLLSESILAAADTVLVTTEWTMYEIAKNPDKQELLYQEIREACGGEAVTEDDLPRLPYLNAVFHETLRLHSPVPVLPPRFVHDDTTLAGYDIAAGTQMMINVYACHMDEKVWESPGEWSPERFLGEGFEVADRYKTMAFGAGRRTCAGSLQAMNIACVAVARLVQELEWRLREGDGDKEDTMQFTALKLDPLHVHLKPRGRM

SEQ ID NO: 161 - DNA, 1783 bp, Fragaria grandiflora
tatcaatcaatggccaccctggtaccaaatccttatggagttccaagcaatgacctttgccatcccttttgctcttgccgctgtctcttggctcttcttgtattacatcagagtctcctactttaccaacaacaacaagagtgcttatgccaagctccctccagttccagtggttcctgggctgccggtgatcgggaatttgctgcaactcaaggagaagaaaccgtacaagactttcacgagctgggctgaggagtatggtccaatctattcgatcaggactggagcatgcaccatggtcgttctcaatagctcccaagttgccaaatgggccatggtgaccacatattcatctatctcaaacagaaagctgtcaagcgcattaaagattctttctgctgatcaatgtatggttgcattaagtgactacaacgattttcacaagatgatcaagcgatacatccgtgcaaatcttcttggatccagagctcagaagcgactccggaccaacagagataccttgagagcaaatgtcttgagtcaatcaaaatctcatgtaaagaactcacctctagaagctgtgaattttacaagagtttttgagtcggaactttttggacttgcagttaaacaagtctatggtaacgacatagaagatcccatttatgttggaggaacttggtgctacactttcaagaaattagatttttcagggctcgtagtgcgtgacatattggatggcggaaatcgatggttgattgattggagagatttcttcccttacctgagatgtattcttaataagaccttggaaacgaaaattcagcgacttcattctcggaggaaaccagtgatgactgccctgatcaacgagcagaagaaacgaattgcttcaggagaggaaatcaattgttatatggacttcttgctttctgaggggaggacactgacaatggaccaaataactatgttggtttgggagactgttattgaaacatcagatactataatggtaacaacagaatgggctatgtatgaaatcgctaaaaatccgaagcaacaggatcgtctctatcaggaaatccaaaaggtatgcgggtcggagatggtgtctgaggaacacttgtcccaactgccatacctgactgcagtcttccatgagactctaaggaagcatagtccggctgcgttagttcctttacgatatgcacatgaagatacccaactaggaggttactacattccagctggaactgagattgcgataaacatatacgggtgtaacatgaacaagcatcaatgggaaagccccgatgaatggaagccggagagatttttggacccgaaatatgatccaatggatttgtacaagaccatggctttcggggcagggaaaagggtatgtgttggttcccttcagggaatgttaatcgcatgcccgacgattggtaggctggtgcaggagtttgagtggaagcttagagctggagaagaagaaaatgtagatactgtcgggctcaccactcacaaacgcgatccaatgcacgcaatcctgaagccaaggagttagttattggtgtaggaaattatgattctgtaatctgtactcatcgtcatccccataaactgcctgtggccgaatctttacccaagttggtggactttgtgttttaagttggttatgggttccgcaacctatcttgacaaactttgttgtcatgaatcatgacaaactttgttatcacggttgaagaacagacatctctattttcagtaaaaaaaa

SEQ ID NO: 162 - protein, 511 aa, Fragaria grandiflora
MEFQAMTFAIPFALAAVSWLFLYYIRVSYFTNNNKSAYAKLPPVPVVPGLPVIGNLLQLKEKKPYKTFTSWAEEYGPIYSIRTGACTMVVLNSSQVAKWAMVTTYSSISNRKLSSALKILSADQCMVALSDYNDFHKMIKRYIRANLLGSRAQKRLRTNRDTLRANVLSQSKSHVKNSPLEAVNFTRVFESELFGLAVKQVYGNDIEDPIYVGGTWCYTFKKLDFSGLVVRDILDGGNRWLIDWRDFFPYLRCILNKTLETKIQRLHSRRKPVMTALINEQKKRIASGEEINCYMDFLLSEGRTLTMDQITMLVWETVIETSDTIMVTTEWAMYEIAKNPKQQDRLYQEIQKVCGSEMVSEEHLSQLPYLTAVFHETLRKHSPAALVPLRYAHEDTQLGGYYIPAGTEIAINIYGCNMNKHQWESPDEWKPERFLDPKYDPMDLYKTMAFGAGKRVCVGSLQGMLIACPTIGRLVQEFEWKLRAGEEENVDTVGLTTHKRDPMHAILKPRS

SEQ ID NO: 163 - DNA, 717 bp, Malus x domestica
gactggcgggacttcttgccttacctgagatgggttcctaataagaccatagagaataaaattcagagactctatcaccgcaggaaagcagtaatgaatgccctgatcaaggagcagaagaagcgaattgcttcaggagaggaattgaattgttatatcgactacttgctttctgaagcaaaaacgctaacaccagagcaaatagtcatgttgctttgggagacaattatcgagacagcggatactacattggtaacaacagagtgggctatgtatgaacttgcaaaagatcagaaacgacaggatcgtctctttgaagaaatccaaaatgtttgtggaaccaacaagattaatgaggaacacttatcccagatgccgtatctgggtgctgttttccatgagactttaaggaagcacagtccagctcctatagttcctctaagatatgtgcatgaagatacccaattaggcggttactatgttccagccggaacagagatcgcgattaacatatacgggtgcaacatggacaagaaccaatgggaaagccccgaagaatggaagccagagagatttttggaaccaaaatacgatccaatcgatttgtacaagacaatggcatttggagctggaaagagggtgtgtgccggttctcttcaggcgatgctgatagcgtgcaccaccatcggaaggctggtacaggagttcgagtggaag

SEQ ID NO: 164 - protein, 239 aa, Malus x domestica
DWRDFLPYLRWVPNKTIENKIQRLYHRRKAVMNALIKEQKKRIASGEELNCYIDYLLSEAKTLTPEQIVMLLWETIIETADTTLVTTEWAMYELAKDQKRQDRLFEEIQNVCGTNKINEEHLSQMPYLGAVFHETLRKHSPAPIVPLRYVHEDTQLGGYYVPAGTEIAINIYGCNMDKNQWESPEEWKPERFLEPKYDPIDLYKTMAFGAGKRVCAGSLQAMLIACTTIGRLVQEFEWK

SEQ ID NO: 165 - DNA, 1797 bp, Pisum sativum
gtggtgaagcaactagcagtggcagccatggatactctcacactttctttgggttttttatctctctttttgttcctcttcttactaaagagatctactcacaaacattccaagctttcccatgtaccagtggttccaggtttgccagtgattgggaatctgctgcaattgaaagagaagaaacctcacaagacattcacaaagatggctcagaaatatggacccattttttccatcaaagctggttcttccaaaatcattgttctcaacactgctcatcttgctaaagaggcaatggtgactagatattcatcaatttcaaaaaggaagctatcaactgcactgacgattctaacttcggataaatgcatggttgctatgagcgactacaatgattttcacaaaatggttaaaaaacatattcttgcaagtgttcttggagccaatgcacagaagcgactccgttttcacagagaggttatgatggaaaatatgtctagtaagtttaatgaacatgtgaagaccctctcagattctgctgttgattttaggaaaatatttgtgtctgaacttttcggattagcactaaagcaagctctgggaagtgatattgaatccatttatgtggagggtttgacggctacattatcaagagaggacttatataacactctagtggttgattttatggagggtgcaattgaggtggattggagagatttcttcccgtacctgaaatggattccaaataagagcttcgagaagaaaatccgtagagtcgatcgccaaagaaaaattatcatgaaggcactaattaatgagcaaaagaagcggttgacatcaggaaaagaattagattgttattatgattacctagtatcagaagctaaagaagtgactgaagaacaaatgatcatgctgctctgggagccaattattgagacatccgatactaccttagtcacgacagaatgggctatgtatgaacttgccaaagacaaaaatcgtcaggaccgtctgtatgaggagctcctaaatgtatgtggacatgaaaaggttacagatgaggagttatctaagttaccttacttaggggctgtattccatgaaacattaaggaaacatagtcctgttccgattgtcccgctaagatatgttgacgaggataccgaattgggaggatatcatattcctgctggaagcgagattgcgataaatatatatggatgcaacatggatagcaacttgtgggaaaatccagaccagtggatcccagagagatttcttgatgagaaatatgcccaagcggatttgtacaagactatggcctttggaggagggaagagggtatgtgcagggtctcttcaggccatgttgatagcttgcacggctatcggcagattggtacaagaatttgagtgggagctgggacatggagaggaagagaatgtggatacaatgggccttaccacccacaggcttcatcccttgcaagtaaaactcaagccaagaaaccgtatttactaagtgcacgtcatagtatagttatctcatatctcaaatctactagttatctcaagagacgacataaactagtttgataaataaagttcggtataacaagagttttgttgagtttttgctgtattgtctgtagtttttcaatcaggtatcgaaaatcgtaaccttgtgtaaaactatgattcaataacagtgtattgatcgtcaagagaggctagttagttttgtttgtctgccgtctctcttgtttccaaataagtttcatttcattcaaaa

SEQ ID NO: 166 - protein, 499 aa, Pisum sativum
MDTLTLSLGFLSLFLFLFLLKRSTHKHSKLSHVPVVPGLPVIGNLLQLKEKKPHKTFTKMAQKYGPIFSIKAGSSKIIVLNTAHLAKEAMVTRYSSISKRKLSTALTILTSDKCMVAMSDYNDFHKMVKKHILASVLGANAQKRLRFHREVMMENMSSKFNEHVKTLSDSAVDFRKIFVSELFGLALKQALGSDIESIYVEGLTATLSREDLYNTLVVDFMEGAIEVDWRDFFPYLKWIPNKSFEKKIRRVDRQRKIIMKALINEQKKRLTSGKELDCYYDYLVSEAKEVTEEQMIMLLWEPIIETSDTTLVTTEWAMYELAKDKNRQDRLYEELLNVCGHEKVTDEELSKLPYLGAVFHETLRKHSPVPIVPLRYVDEDTELGGYHIPAGSEIAINIYGCNMDSNLWENPDQWIPERFLDEKYAQADLYKTMAFGGGKRVCAGSLQAMLIACTAIGRLVQEFEWELGHGEEENVDTMGLTTHRLHPLQVKLKPRNRIY

SEQ ID NO: 167 - DNA, 1554 bp, Cucurbita maxima
atggcggtcgctactgatccgctcggctgcatgcaaaaactcgtccagatgcttcaggctccgccgtatgtcgcggccgccgttcagagtagtgcgttgcttctgacgtttttcatcggagattggagaaagagacgtcggagccctctacctctgttgccggcgattccggggataccggtgctggggaatctgttgcagttgaaggagaagaagccgcacaaaacgtttgctcagtggtccgagacgtatggtccgatttattccataaaagccggcgcctccactgtgatcgttctcaactcctccgatctcgccaaagaggctatggtgacgaggtactcttccatttccagtagaaaactaagcaaagccctcactatcttgactgctgataaatgcatggttgctatgagcgattacaatgactttcataagctggttaagagatacatattggctaatgtcttgggggctaacgctcagaaaagactcagacaaaggagagacaccatgatagacaatatttccagagaattgtttgcttgtgtgaaggattcttcatcagaatctgttaatttccgaaagatctttgaatcggaactcttcgggctggcgcttaaagaaacgtttgggagggatatggagtcgttatatgtcgatgggctcggtactacgttgctgagagaagatctgttcagaactttagtgattgatccgatggagggtgcgatcgaggttgattggagagatttcttcccatatctgagatggattcccaacaagggtgtggaggataggatcaggaagatggactttcgcaggcgagtgacgatgaagagcctcatggaggagaagaagaagcaaattgcagctggggaggatttgaattgctattctgagttcttgttatctgaagcaaaatcgctcacagaggaacagatatccatgttgctctgggagataatcattgaaacctcagacactactctggttgtaactgaatgggctatgtatgaacttgctcaaaatcctaaacgacaggagcgtctatatcagcatatacaaagtgtgtgtggatctgcaaagattactgaagaaaacctgtcacagctcccatatttgactgccgtttttcacgaaactcttcggaagtacagtccagtctcgattgttccattgcgatatgcacatgaagatacccagttaggggggtactttattcctgcagggagtgaggttgctgtcaacatttacgcctgcaacatggacaagaaacaatgggaaagccctgaggaatggaaaccagagaggtttcttgatgagagctatgatccaatggacctgtacaaaaccatggcgttcggaggcgggaagagggtgtgtgcaggtgcccccaaggcaatgctgatagcttgcactacccttggaaggctggttcaagggttcacttggaagctgagggaaggagaagaagacaaggtcgacactctcggcctcactgctcgcaagctccaaccactgcatatcgtcgccaaaccgagaatcaactaa

SEQ ID NO: 168 - protein, 517 aa, Cucurbita maxima
MAVATDPLGCMQKLVQMLQAPPYVAAAVQSSALLLTFFIGDWRKRRRSPLPLLPAIPGIPVLGNLLQLKEKKPHKTFAQWSETYGPIYSIKAGASTVIVLNSSDLAKEAMVTRYSSISSRKLSKALTILTADKCMVAMSDYNDFHKLVKRYILANVLGANAQKRLRQRRDTMIDNISRELFACVKDSSSESVNFRKIFESELFGLALKETFGRDMESLYVDGLGTTLLREDLFRTLVIDPMEGAIEVDWRDFFPYLRWIPNKGVEDRIRKMDFRRRVTMKSLMEEKKKQIAAGEDLNCYSEFLLSEAKSLTEEQISMLLWEIIIETSDTTLVVTEWAMYELAQNPKRQERLYQHIQSVCGSAKITEENLSQLPYLTAVFHETLRKYSPVSIVPLRYAHEDTQLGGYFIPAGSEVAVNIYACNMDKKQWESPEEWKPERFLDESYDPMDLYKTMAFGGGKRVCAGAPKAMLIACTTLGRLVQGFTWKLREGEEDKVDTLGLTARKLQPLHIVAKPRIN

SEQ ID NO: 169 - DNA, 2618 bp, Arabidopsis thaliana Columbia
aagtttctatgaaacgtaaaacgatgagtttagtaaaaaaaaactagagattatagtcagaaaaactataataataagaagataacattaaacggatagattcatgtctcttttttgaaatccaaaattgggtaaaatccaaaaaccaaaatcttgccaaatgccaataagagcaaaaatccaaactttcctttctcttcactattacacaatgaaatcaacactacattttcacatcaaaatcacattccttccatggccttcttctccatgatctccattctccttggctttgttatctcctccttcatcttcatcttcttcttcaagaaacttctctccttctccagaaagaacatgtctgaagtctccactctcccctctgttccaggttttttttttttttttttccgattttgtaatctgggttttgcgattcataggtttggtgactacttctgtttcaaagtttgaaactttctttgattctagtgatttatggaactaaaaatttgatctttgagaactttaaaagttgggtttttgatgtagtggtaccagggtttcctgttattgggaacttgctgcaactaaaagagaagaaacctcacaagactttcactagatggtcagagatttatggtcctatttactctataaagatgggttcttcttctcttattgtcctcaattctactgagactggcaaagaggttagctttctaggtttgattgatatgtttggaatcgaaaaatcgttcctttttcgatcttgaacacatgactaaagccttacacaacttgatgattgctcttgtttatatgattgtagtctgaacttatgtagaaaagttgagttgatgtcttctcttatcgtttaggttactctttatgtgtttgttttcaggccatggtgacgcggttttcgtctatctcaacgaggaagttgtcaaatgcgttgacagtccttacttgtgacaaatctatggttgctactagtgattatgatgatttccacaagttggtgaaacggtgtctcttgaacggtcttttgggtgctaatgcacaggtgaattcattgttcgtttatcccgcagcttctccttggtatacataatggcaactgaatcaatcttttgtgttgtgttggttttttttgcagaaacgaaaaagacattacagagatgcactcattgaaaatgtgtcttccaagttgcatgcccatgctagggaccatccacaagaacctgtaaacttcagagctatatttgagcatgagcttttcggtgtagcattgaagcaagtgagtgtttcgcttatcctatacatcatttcttcgtcaacataaagtatgaaaatggatttttggttttgttttcataggcttttgggaaagatgtggaatccatttatgttaaagaactcggtgtgactttgtcgaaagacgagatcttcaaggttttagtacatgacatgatggaaggtgcaattgatgttgattggagagacttcttcccatacttgaaatggattccaaataaaagttttgaagcaagaatccagcaaaagcataaacgtagactcgcagtgatgaatgctctgattcaagatcgactgaagcagaatggttcagaatcggttagttttgtttgaatagtctttcatatattgcattacactgctgatctaatctctacttataaacaggatgatgattgctatctcaacttcttgatgtcggaagcgaaaacactaaccaaggagcaaattgctatcttggtttgggagacgattatcgagacagctgacactactttggttacaactgaatgggccatctatgagctcgctaagcatccaagtgtccaagatcgtctgtgcaaagaaatccaaaatgtctgcggaggagaaaagttcaaagaagagcaattgtctcaagttccttatctcaatggagtctttcatgaaacgcttaggaaatacagtcctgctcctctagttcccattcgctacgcccacgaggatacgcaaatcggaggctatcatgtccctgcaggaagtgaggtaaacctacctattactctcaagtcattcacatttgaagttcacttacaaagtctagtttcaaaatcttgatgtgtagattgcaataaacatatatggatgcaacatggataagaagcgttgggagagaccagaggactggtggccggagcggtttcttgatgatggcaaatatgaaacgtcagatcttcacaagacaatggcgtttggagcgggaaagagggtttgtgctggtgctcttcaagcatctctcatggcaggcattgctattggaagattagtgcaagaattcgagtggaagcttagagatggcgaagaagagaatgtggatacatatggcttgacctctcagaagctttatcctcttatggctattatcaatccaaggcgttcttaagacagaaatctcttctttcttttgttagtttttaaccttgtatcaacttttatttgtaacaaatgctgttttgtagtactatttatgttttactgtgttatattttactatcctctgagattgcatcatcttattgattcttataggatgctgatgg

SEQ ID NO: 170 - protein, 509 aa, Arabidopsis thaliana Columbia
MAFFSMISILLGFVISSFIFIFFFKKLLSFSRKNMSEVSTLPSVPVVPGFPVIGNLLQLKEKKPHKTFTRWSEIYGPIYSIKMGSSSLIVLNSTETGKEAMVTRFSSISTRKLSNALTVLTCDKSMVATSDYDDFHKLVKRCLLNGLLGANAQKRKRHYRDALIENVSSKLHAHARDHPQEPVNFRAIFEHELFGVALKQAFGKDVESIYVKELGVTLSKDEIFKVLVHDMMEGAIDVDWRDFFPYLKWIPNKSFEARIQQKHKRRLAVMNALIQDRLKQNGSESDDDCYLNFLMSEAKTLTKEQIAILVWETIIETADTTLVTTEWAIYELAKHPSVQDRLCKEIQNVCGGEKFKEEQLSQVPYLNGVFHETLRKYSPAPLVPIRYAHEDTQIGGYHVPAGSEIAINIYGCNMDKKRWERPEDWWPERFLDDGKYETSDLHKTMAFGAGKRVCAGALQASLMAGIAIGRLVQEFEWKLRDGEEENVDTYGLTSQKLYPLMAIINPRRS

SEQ ID NO: 171 - DNA, 2935 bp, Arabidopsis thaliana Landsberg erecta
tgacattcgctggacccgttaatccaacttggaaaatggtccgattacctctattaattgatgatccaaagaaaaactcaattatgtcgagataggtaaaaaaacattattttaaaagaaataatgaatttaaaattagtaaataaaatttaaaatttaaaaatcctcctataaattttgtgtctcacaactttctttcaaactttttttcttcaaaaatataccgtatgctgatgaaatttttatctttaccaattaagaatataatcttttgtttccatctcaaatcatcatcatcacctccaaagcgtttagcaaccccaaaaccaaccacttggcgactacacagtattttactcaaaacatcacaagtttctatgaaacgtaaaacgatgagtttagtaaaaaaaaactagagattatagtcagaaaaactataataataagaagataacattaaacggatagattcatgtctcttttttgaaatccaaaattgggtaaaatccaaaaaccaaaatcttgccaaatgccaataagagcaaaaatccaaactttcctttctcttcactattacacaatgaaatcaacactacattttcacatcaaaatcacattccttccatggccttcttctccatgatctccattctccttggctttgttatctcctccttcatcttcatcttcttcttcaagaaacttctctccttctccagaaagaacatgtctgaagtctccactctcccctctgttccaggtttttttttttttttttccgattttgtaatctgggttttgcgattcataggtttggtgactacttctgtttcaaagtttgaaactttctttgattctagtgatttatggaactaaaaatttgatctttgagaactttaaaagttgggtttttgatgtagtggtaccagggtttcctgttattgggaacttgctgcaactaaaagagaagaaacctcacaagactttcactagatggtcagagatttatggtcctatttactctataaagatgggttcttcttctcttattgtcctcaattctactgagactgccaaagaggttagctttctaggtttgattgatatgtttggaatcgaaaaatcgttcctttttcgatcttgaacacatgactaaagccttacacaacttgatgattgctcttgtttatatgattgtagtctgaacttatgtagaaaagttgagttgatgtcttctcttatcgtttaggttactctttatgtgtttgttttcaggccatggtgacgcggttttcgtctatctcaacgaggaagttgtcaaatgcgttgacagtccttacttgtgacaaatctatggttgctactagtgattatgatgatttccacaagttggtgaaacggtgtctcttgaacggtcttttgggtgctaatgcacaggtgaattcattgttcgtttatcccgcagcttctccttggtatacataatggcaactgaatcaatcttttgtgttgtgttggttttttttgcagaaacgaaaaagacattacagagatgcactcattgaaaatgtgtcttccaagttgcatgcccatgctagggaccatccacaagaacctgtaaacttcagagctatatttgagcatgagcttttcggtgtagcattgaagcaagtgagtgtttcgcttatcctatacatcatttcttcgtcaacataaagtatgaaaatggatttttggttttgttttcataggcttttgggaaagatgtggaatccatttatgttaaagaactcggtgtgactttgtcgaaagacgagatcttcaaggttttagtacatgacatgatggaaggtgcaattgatgttgattggagagacttcttcccatacttgaaatggattccaaataaaagttttgaagcaagaatccagcaaaagcataaacgtagactcgcggtgatgaatgctctgattcaagatcgactgaagcagaatggttcagaatcggttagttttgtttgaatagtctttcatatattgcattacactgctgatctaatctctacttataaacaggatgatgattgctatctcaacttcttgatgtcggaagcgaaaacactaaccaaggagcaaattgctatcttggtttgggagacgattatcgagacagctgacactactttggttacaactgaatgggccatctatgagctcgctaagcatccaagtgtccaagatcgtctgtgtaaagaaatccaaaatgtctgcggaggagaaaagttcaaagaagagcaattgtctcaagttccttatctcaatggagtattccatgaaacgcttaggaaatacagtcctgctcctctagtccccattcgctatgcccacgaagatacgcaaatcggaggctatcatgtccctgcaggaagtgaggtacaccgagtcaattcacattttgaagttcatttacaaagtctagtttcaaaatcttgatgtgtagattgcaataaacatctatggatgcaacatggataagaagcgttgggagagaccagaggactggtggccggagcggtttcttgatgatggcaaatacgaaacgtcggatcttcacaagacaatggcgtttggagcgggaaagagggtttgtgctggtgctcttcaagcatctctcatggcaggcattgccattgggaggttagtgcaagaattcgagtggaagcttagagacggtgaagaagagaatgtggatacatatggcttgacctctcagaagctttatcctcttatggctattatcaatccaaggcgttcttaagacagaaatctcttctttcttttgttagtttttaaccttgtatcaacttttatttgtaacaaatgctgttttgtagtactatttatgttttactgtgttatattttactatcctctga

SEQ ID NO: 172 - protein, 509 aa, Arabidopsis thaliana Landsberg erecta; identical to SEQ ID NO: 146

SEQ ID NO: 173 - DNA, 1678 bp, Arabidopsis thaliana
acattttcacatcaaaatcacattccttccatggccttcttctccatgatctccattctccttggctttgttatctcctccttcatcttcatcttcttcttcaagaaacttctctccttctccagaaagaacatgtctgaagtctccactctcccctctgttccagtggtaccagggtttcctgttattgggaacttgctgcaactaaaagagaagaaacctcacaagactttcactagatggtcagagatttatggtcctatttactctataaagatgggttcttcttctcttattgtcctcaattctactgagactgccaaagaggccatggtgacgcggttttcgtctatctcaacgaggaagttgtcaaatgcgttgacagtccttacttgtgacaaatctatggttgctactagtgattatgatgatttccacaagttggtgaaacggtgtctcttgaacggtcttttgggtgctaatgcacagaaacgaaaaagacattacagagatgcactcattgaaaatgtgtcttccaagttgcatgcccatgctagggaccatccacaagaacctgtaaacttcagagctatatttgagcatgagcttttcggtgtagcattgaagcaagcttttgggaaagatgtggaatccatttatgttaaagaactcggtgtgactttgtcgaaagacgagatcttcaaggttttagtacatgacatgatggaaggtgcaattgatgttgattggagagacttcttcccatacttgaaatggattccaaataaaagttttgaagcaagaatccagcaaaagcataaacgtagactcgcggtgatgaatgctctgattcaagatcgactgaagcagaatggttcagaatcggatgatgattgctatctcaacttcttgatgtcggaagcgaaaacactaaccaaggagcaaattgctatcttggtttgggagacgattatcgagacagctgacactactttggttacaactgaatgggccatctatgagctcgctaagcatccaagtgtccaagatcgtctgtgtaaagaaatccaaaatgtctgcggaggagaaaagttcaaagaagagcaattgtctcaagttccttatctcaatggagtattccatgaaacgcttaggaaatacagtcctgctcctctagtccccattcgctatgcccacgaagatacgcaaatcggaggctatcatgtccctgcaggaagtgagattgcaataaacatctatggatgcaacatggataagaagcgttgggagagaccagaggactggtggccggagcggtttcttgatgatggcaaatacgaaacgtcggatcttcacaagacaatggcgtttggagcgggaaagagggtttgtgctggtgctcttcaagcatctctcatggcaggcattgccattgggaggttagtgcaagaattcgagtggaagcttagagacggtgaagaagagaatgtggatacatatggcttgacctctcagaagctttatcctcttatggctattatcaatccaaggcgttcttaagacagaaatctcttctttcttttgttagtttttaaccttgtatcaacttttatttgtaacaaatgctgttttgtagtactatttatgttttactgtgttatattttactatcctctga

SEQ ID NO: 174 - protein, 509 aa, Arabidopsis thaliana; identical to SEQ ID NO: 146

SEQ ID NO: 175 - DNA, 1569 bp, Unknown
  Reg. No. 181186-97-0
atgggtctcttccctttggaagatagttacgcactcgtctttgaaggtttagcaataactctagctctctactacttattatccttcatctataaaacctctaaaaagacttgtactccacctaaagcaagcggtgagcaccctataacaggccacttaaaccttcttagtggttcatccggtcttccccatctagccttagcatctttggctgaccgatgtgggcccatattcaccatccgacttggcatacgtagagttttggtggttagtaattgggaaattgctaaggagatcttcactacccatgatttgattgtttcaaaccgtcccaaatacctcgctgcaaagattttgggattcaactatgtgtccttttcgtttgctccatatggcccctattgggttggaatccgtaagatcatcgccacaaaactgatgtcaagtagcaggctccagaagcttcagtttgtccgagttttcgaactagaaaactccatgaaaagcatacgcgagtcttggaaagagaaaaaagacgaagaaggtaaagtgttggtggagatgaaaaaatggttttgggaattgaatatgaatatagttcttagaactgttgctggtaaacagtacactggaactgttgatgatgcggatgcgaagaggattagtgaattgtttagagaatggtttcattacacaggaaggtttgttgtgggagatgcttttccttttcttgggtggttggatttgggtggatataagaagaccatggaactagtggcttccagactagattccatggtctcaaaatggttagacgagcatcgcaaaaagcaggctaacgacgacaaaaaagaggacatggatttcatggacatcatgatatcgatgactgaagccaattcccctttggagggttatggtacggatacaataattaaaaccacttgcatgactcttattgtcagtggtgtagatacaacctccatcgtgctaacttgggcactctcgttactactgaacaaccgtgacactcttaagaaagctcaagaagagctagacatgtgtgtgggaaaaggtcgacaagtaaacgaatcagatctagtaaacctaatctaccttgaagccgtattaaaagaagcattgcgactatacccagcagcattccttggaggtcctagagcctttttagaagactgcaccgtggcagggtaccgtatcccaaaaggcacatgtctacttattaacatgtggaaacttcatcgtgatccaaacatatggtcagacccatgtgagtttaaaccagagaggttcttaaccccaaaccaaaaggacgtagatgttattggaatggattttgagttaatcccatttggtgcgggaagaaggtattgtccagggacacgtttggcattacaaatgttacacatagttctggccactctactacaaaactttgagatgtcaactccaaatgatgcacccgttgatatgaccgcgagtgttggaatgacaaatgcgaaggcaagtccacttgaagttctactttcgccacgtgttaagtggtcatag

SEQ ID NO: 176 - protein, 522 aa, Unknown
  Reg. No. 181186-97-0
MGLFPLEDSYALVFEGLAITLALYYLLSFIYKTSKKTCTPPKASGEHPITGHLNLLSGSSGLPHLALASLADRCGPIFTIRLGIRRVLVVSNWEIAKEIFTTHDLIVSNRPKYLAAKILGFNYVSFSFAPYGPYWVGIRKIIATKLMSSSRLQKLQFVRVFELENSMKSIRESWKEKKDEEGKVLVEMKKWFWELNMNIVLRTVAGKQYTGTVDDADAKRISELFREWFHYTGRFVVGDAFPFLGWLDLGGYKKTMELVASRLDSMVSKWLDEHRKKQANDDKKEDMDFMDIMISMTEANSPLEGYGTDTIIKTTCMTLIVSGVDTTSIVLTWALSLLLNNRDTLKKAQEELDMCVGKGRQVNESDLVNLIYLEAVLKEALRLYPAAFLGGPRAFLEDCTVAGYRIPKGTCLLINMWKLHRDPNIWSDPCEFKPERFLTPNQKDVDVIGMDFELIPFGAGRRYCPGTRLALQMLHIVLATLLQNFEMSTPNDAPVDMTASVGMTNAKASPLEVLLSPRVKWS

SEQ ID NO: 177 - DNA, 1586 bp, Stevia rebaudiana
atggatgcaatggctacaactgagaagaaaccacacgtcatcttcataccatttccagcacaaagccacattaaagccatgctcaaactagcacaacttctccaccacaaaggactccagataaccttcgtcaacaccgacttcatccacaaccagtttcttgaatcatcgggcccacattgtctagacggtgcaccgggtttccggttcgaaaccattccggatggtgtttctcacagtccggaagcgagcatcccaatcagagaatcactcttgagatccattgaaaccaacttcttggatcgtttcattgatcttgtaaccaaacttccggatcctccgacttgtattatctcagatgggttcttgtcggttttcacaattgacgctgcaaaaaagcttggaattccggtcatgatgtattggacacttgctgcctgtgggttcatgggtttttaccatattcattctctcattgagaaaggatttgcaccacttaaagatgcaagttacttgacaaatgggtatttggacaccgtcattgattgggttccgggaatggaaggcatccgtctcaaggatttcccgctggactggagcactgacctcaatgacaaagttttgatgttcactacggaagctcctcaaaggtcacacaaggtttcacatcatattttccacacgttcgatgagttggagcctagtattataaaaactttgtcattgaggtataatcacatttacaccatcggcccactgcaattacttcttgatcaaatacccgaagagaaaaagcaaactggaattacgagtctccatggatacagtttagtaaaagaagaaccagagtgtttccagtggcttcagtctaaagaaccaaattccgtcgtttatgtaaattttggaagtactacagtaatgtctttagaagacatgacggaatttggttggggacttgctaatagcaaccattatttcctttggatcatccgatcaaacttggtgataggggaaaatgcagttttgccccctgaacttgaggaacatataaagaaaagaggctttattgctagctggtgttcacaagaaaaggtcttgaagcacccttcggttggagggttcttgactcattgtgggtggggatcgaccatcgagagcttgtctgctggggtgccaatgatatgctggccttattcgtgggaccagctgaccaactgtaggtatatatgcaaagaatgggaggttgggctcgagatgggaaccaaagtgaaacgagatgaagtcaagaggcttgtacaagagttgatgggagaaggaggtcacaaaatgaggaacaaggctaaagattggaaagaaaaggctcgcattgcaatagctcctaacggttcatcttctttgaacatagacaaaatggtcaaggaaatcaccgtgctagcaagaaactagttacaaagttgtttcacattgtgctttctatttaagatgtaactttgttctaatttaatattgtctagatgtattgaaccataagtttagttggtctcaggaattgatttttaatgaaataatggtcattaggggtgagt

SEQ ID NO: 178 - protein, 481 aa, Stevia rebaudiana
MDAMATTEKKPHVIFIPFPAQSHIKAMLKLAQLLHHKGLQITFVNTDFIHNQFLESSGPHCLDGAPGFRFETIPDGVSHSPEASIPIRESLLRSIETNFLDRFIDLVTKLPDPPTCIISDGFLSVFTIDAAKKLGIPVMMYWTLAACGFMGFYHIHSLIEKGFAPLKDASYLTNGYLDTVIDWVPGMEGIRLKDFPLDWSTDLNDKVLMFTTEAPQRSHKVSHHIFHTFDELEPSIIKTLSLRYNHIYTIGPLQLLLDQIPEEKKQTGITSLHGYSLVKEEPECFQWLQSKEPNSVVYVNFGSTTVMSLEDMTEFGWGLANSNHYFLWIIRSNLVIGENAVLPPELEEHIKKRGFIASWCSQEKVLKHPSVGGFLTHCGWGSTIESLSAGVPMICWPYSWDQLTNCRYICKEWEVGLEMGTKVKRDEVKRLVQELMGEGGHKMRNKAKDWKEKARIAIAPNGSSSLNIDKMVKEITVLARN

SEQ ID NO: 179 - DNA, 1555 bp, Stevia rebaudiana
atggcggaacaacaaaagatcaagaaatcaccacacgttctactcatcccattccctttacaaggccatataaaccctttcatccagtttggcaaacgattaatctccaaaggtgtcaaaacaacacttgttaccaccatccacaccttaaactcaaccctaaaccacagtaacaccaccaccacctccatcgaaatccaagcaatttccgatggttgtgatgaaggcggttttatgagtgcaggagaatcatatttggaaacattcaaacaagttgggtctaaatcactagctgacttaatcaagaagcttcaaagtgaaggaaccacaattgatgcaatcatttatgattctatgactgaatgggttttagatgttgcaattgagtttggaatcgatggtggttcgtttttcactcaagcttgtgttgtaaacagcttatattatcatgttcataagggtttgatttctttgccattgggtgaaactgtttcggttcctggatttccagtgcttcaacggtgggagacaccgttaattttgcagaatcatgagcaaatacagagcccttggtctcagatgttgtttggtcagtttgctaatattgatcaagcacgttgggtcttcacaaatagtttttacaagctcgaggaagaggtaatagagtggacgagaaagatatggaacttgaaggtaatcgggccaacacttccatccatgtaccttgacaaacgacttgatgatgataaagataacggatttaatctctacaaagcaaaccatcatgagtgcatgaactggttagacgataagccaaaggaatcagttgtttacgtagcatttggtagcctggtgaaacatggacccgaacaagtggaagaaatcacacgggctttaatagatagtgatgtcaacttcttgtgggttatcaaacataaagaagagggaaagctcccagaaaatctttcggaagtaataaaaaccggaaagggtttgattgtagcatggtgcaaacaattggatgtgttagcacacgaatcagtaggatgctttgttacacattgtgggttcaactcaactcttgaagcaataagtcttggagtccccgttgttgcaatgcctcaattttcggatcaaactacaaatgccaagcttctagatgaaattttgggtgttggagttagagttaaggctgatgagaatgggatagtgagaagaggaaatcttgcgtcatgtattaagatgattatggaggaggaaagaggagtaataatccgaaagaatgcggtaaaatggaaggatttggctaaagtagccgttcatgaaggtggtagctcagacaatgatattgtcgaatttgtaagtgagctaattaaggcttaaatttttgttgctttgtattttatgtgttatggttttttgatttagatgtattcaattaatattgaatcataactaaattcaagattattgtttgtaatattctttgtcctaaaattttgcgacttaaaacctttagtttataaaaagaaattagaaaatactattgcacgga

SEQ ID NO: 180 - protein, 460 aa, Stevia rebaudiana
MAEQQKIKKSPHVLLIPFPLQGHINPFIQFGKRLISKGVKTTLVTTIHTLNSTLNHSNTTTTSIEIQAISDGCDEGGFMSAGESYLETFKQVGSKSLADLIKKLQSEGTTIDAIIYDSMTEWVLDVAIEFGIDGGSFFTQACVVNSLYYHVHKGLISLPLGETVSVPGFPVLQRWETPLILQNHEQIQSPWSQMLFGQFANIDQARWVFTNSFYKLEEEVIEWTRKIWNLKVIGPTLPSMYLDKRLDDDKDNGFNLYKANHHECMNWLDDKPKESVVYVAFGSLVKHGPEQVEEITRALIDSDVNFLWVIKHKEEGKLPENLSEVIKTGKGLIVAWCKQLDVLAHESVGCFVTHCGFNSTLEAISLGVPVVAMPQFSDQTTNAKLLDEILGVGVRVKADENGIVRRGNLASCIKMIMEEERGVIIRKNAVKWKDLAKVAVHEGGSSDNDIVEFVSELIKA

SEQ ID NO: 181 - DNA, 1616 bp, Stevia rebaudiana
cttgcgtgtaaacgtcagtcaaacccaatggaaaataaaacggagaccaccgttcgccggcgccggagaataatattattcccggtaccatttcaaggccacattaacccaattcttcagctagccaatgtgttgtactctaaaggattcagtatcaccatctttcacaccaacttcaacaaacccaaaacatctaattaccctcacttcactttcagattcatcctcgacaacgacccacaagacgaacgcatttccaatctaccgactcatggtccgctcgctggtatgcggattccgattatcaacgaacacggagctgacgaattacgacgcgaactggaactgttgatgttagcttctgaagaagatgaagaggtatcgtgtttaatcacggatgctctttggtacttcgcgcaatctgttgctgacagtcttaacctccgacggcttgttttgatgacaagcagcttgtttaattttcatgcacatgtttcacttcctcagtttgatgagcttggttacctcgatcctgatgacaaaacccgtttggaagaacaagcgagtgggtttcctatgctaaaagtgaaagacatcaagtctgcgtattcgaactggcaaatactcaaagagatattagggaagatgataaaacaaacaaaagcatcttcaggagtcatctggaactcatttaaggaactcgaagagtctgagctcgaaactgttatccgtgagatcccggctccaagtttcttgataccactccccaagcatttgacagcctcttccagcagcttactagaccacgatcgaaccgtttttcaatggttagaccaacaaccgccaagttcggtactgtatgttagttttggtagtactagtgaagtggatgagaaagatttcttggaaatagctcgtgggttggttgatagcaagcagtcgtttttatgggtggttcgacctgggtttgtcaagggttcgacgtgggtcgaaccgttgccagatgggttcttgggtgaaagaggacgtattgtgaaatgggttccacagcaagaagtgctagctcatggagcaataggcgcattctggactcatagcggatggaactctacgttggaaagcgtttgtgaaggtgttcctatgattttctcggattttgggctcgatcaaccgttgaatgctagatacatgagtgatgttttgaaggtaggggtgtatttggaaaatgggtgggaaagaggagagatagcaaatgcaataagaagagttatggtggatgaagaaggagaatacattagacagaatgcaagagttttgaaacaaaaggcagatgtttctttgatgaagggtggttcgtcttacgaatcattagagtctctagtttcttacatttcatcgttgtaaataacacgatgattaatcaagcacttggattgcatgctagctgagtagctggtaatttgagttattagaagcaaagactacttggtttaaattaaataaaggatggttgttggttatgtgagctagtttatgttatgttttgtaggctataaaagccttcatatgtttcttattgtttctgtttctaaggtgaaaaaaatgctcgtttttat

SEQ ID NO: 182 - protein, 458 aa, Stevia rebaudiana
MENKTETTVRRRRRIILFPVPFQGHINPILQLANVLYSKGFSITIFHTNFNKPKTSNYPHFTFRFILDNDPQDERISNLPTHGPLAGMRIPIINEHGADELRRELELLMLASEEDEEVSCLITDALWYFAQSVADSLNLRRLVLMTSSLFNFHAHVSLPQFDELGYLDPDDKTRLEEQASGFPMLKVKDIKSAYSNWQILKEILGKMIKQTKASSGVIWNSFKELEESELETVIREIPAPSFLIPLPKHLTASSSSLLDHDRTVFQWLDQQPPSSVLYVSFGSTSEVDEKDFLEIARGLVDSKQSFLWVVRPGFVKGSTWVEPLPDGFLGERGRIVKWVPQQEVLAHGAIGAFWTHSGWNSTLESVCEGVPMIFSDFGLDQPLNARYMSDVLKVGVYLENGWERGEIANAIRRVMVDEEGEYIRQNARVLKQKADVSLMKGGSSYESLESLVSYISSL

SEQ ID NO: 183 - DNA, 4624 bp, Nicotiana tabacum
ccttatatttatccaccacttgagctactttctataaccaattaaagtaagtccaattctaacattgtatgctgtgctgcccttatttttggctacaaaactcgaaagcaaaggaactagaaaactcgtctggcgagagaaagagagatgagtcaatcaatttctccaatctttcctcgctttgcaaaatttcagtcgaatatttggaggtgcagtacttttgaactcagagttatacactcatcatatgcctctattggagggaggagaaaagagagagaaagaagaatgaagcgagcaatgaatccttcttcaagctcgcgtcatttggcagattttcactcaaccatttggggtgaccattttctctcctacaattctgaaataacagtaggtcacatacatatgtaatcacatgcttatattctatttgaatttgttatctaaatgtttaaaggaataaagatgttataattttattagagacaggatcaagcatttaaacttggaaggtttaacctttaagattggtctttatcgtacttttgaaattatgagtttgaaatttaatactccatccgtctcaataaagaatgaatattttactatctagggagtcaaacaagattttctcaaccttttttttcgcaaatgcattttaaaaattttgaaatttttaattgttgtgacttacaactaccttcttatgtacttcctaaatgtgtaaatctcattttcaaaaaatttacggaatatatattcgtcacattgaaaatatttaatttgaccctcatactccgaaaaggttcaaataaattgaaacgaatggaatagtactattttgtaaaaacttatgtagattttcactatatatctaataagtattcaaaactaataaataatgatcaacatatgcggatctaagatttaaattttttgggttcacctttaaggatctgttacaattttagtagaatgttaccataaatttgtgctccgtgaaatgtattgagtcagatgaacctggtattatacatgcggatacgctcctgatgctcaatttctgcctgcaggaaattactacccaagagaaaaatgaacatgaaatgctaaaagaaatagttcggaaaatgttggtagaaactccagataatagtacacaaaaactagtcttgattgacacaattcaaagattgggattagcatatcatttcaatgatgagattgaaaactccattcaaaacatctttaatttgtctcaaaatagtgaaaatgacaatgaacacaacctttatgttgctgctcttcgttttcgacttgcgaggcaacaaggatattacatgtcttcaggtaccttacatttctgccctttcccgcacagcttcattttttttcgttgttaaaggcagctcggcgtataaaatatctcgtgtatacgcagggtcaggacggaaccgcccccaaggggtgtaaagtatgcaacctaccctaatactaaatatctcgtgttatacacagggtcaggacaagtcgcacccaagaggtgtaatgtaggcaacttaccctaatgctagcattagtaactgattttatggctcaaacacataaattgtaggtcacacagtaacaactttatcgttctcaaagactcgccttcctctttttttagttatcgcaccttatttgttgcaaagaatagcaagtttcgagatctgcttctatataaaaaacttctgtattatacttttttattttgtccttctgcttaaaaatagtaaaaaactataatgtggaaattgtaaatttcttaactagctgtgaaatcaaatagttattataggaatataatttagactccacttatggaaaaccactgggttgccgttgttattgtcaataataacttggggtacgatttacttctttttccatggctgtccacgactatatttctattaaccaatgttgtgactatgctttcccttgagtcgaggatctattgataacaggctcttcgatctttaacaaggtaaaagtaatgtctgcgtacacactctactccgcagacccacttgtaggatttcattgaatttttttttttgttgttgttgttgtaataacttagggtttagtttcttgatgctgatgaaattcagttctttcaactataaacatggtgttcaccagatgtgttcaagcaattcactaaccatgacggaaaattcaaggaaaatcatattaatgatattcaaggattactaagtttgtatgaagcaacacatatgagagtgcacgacgaggaaattctagaagaagctcttatctttaccaccactcatctcgagtccatgatcccaaatttgagcaactcgcttaaggtacaagttactgaagcctcaaaccaacctattcgcaaaactataccgagggtgggatcaaggaaatacatatacatatatgaaaacattggaacacataatgatttgcttgtgaaatttgcaaagttggactttaacatgttacaagagcttcatcgaaaagagctcaacgagctaacaaggtacatctactattcttatcattttcatagttatggtacagtcagatctctctataaaatccatcctttataacaacggttcaccataacggtcatgttttctttagaactaatcttttatgttaccaaaaaatttcgaaacaattgagactattatagagatgtttgatggtaactcgcgctaattaataacacctaaagtttaagtatgttaatgttgttgtgttatctatagctggtggaaagaaatggattttgcaacaaatttccaatatgcaaagggcagattggtagaagcttacttttggatggtgggaatatattttgaacctcaatatagtcgttcaagaagaatgataacacaagtagtcaacatgaactccatcattgatgacacttatgatgcttttgcaacttttgatgagcttatgcttttcacggatgcgatccaaaggtaatctttctataacaactgcatttgttctgataattttttaagatgctatttgaagtgttgttatagagaaatatattatgacaacttagactttgcagatgggatgtaggtgccatggattcattaccggcatatttgagacctatttatcaaggccttctcgacgttttcaatgaaatggaagaagtaatggccaaagaaggtaaagcagatcgcatctactatgcgaaaaaagaggtaatccttgattaagttacattaattactacttaataagttaattaagtaaaccaagttgtagggaagaatcacaattttgaactattagtactttttctgttacttttttagatgaaaaagttggtggcagcctattttaaggaagttgaatggttgaatgctaactacattccaaaatgtgaggagtatatgaaaaatggagttgtaagttgtaccggtagatgtatggaacaatttgctttggttgttatcgaggaaattataacaaaagaggcttttgaatggttggcaaatgaacctttgattcctcgagctgcatcaacaatctgtagattaatggatgatattgttgatcatgaattaagtataacaatataatttccattttatataacaattagtcatcctaattcacaaattttgtccctaaatacatacaaaaacaactacaataacagaaacaacatatccagtgtattcctatagtacgggtctgggcagagagatgtgtatgaagatcttaccctatcttgtggaggtagaaaggttgtttcccgatagaccctcgactcaaaaaaacatttctcaatctgatttcgagtctaggtggcacttttgcatgatataataaatagacatgcttgataaattacaacttcaatgagcacatttacataaagtgatttatggaactttagaaacgaactgattaaaatggtaaaatattgtataatattaatgaagatattgaaatatattatgtgtaggttgaacaacaaagaggacatgttgcttcatttgttgagtactacatgaaagaatatggaacttcaaagcaagaagcatatgttgagatgtggaaaaagatcacaaatgcgtggaaagacataaataaggaactcctgcgcgctactgcagtaccaatgtttgtcctcgaacgaactttagattatacaagattggttgatacatgtttcaaagatgatgatggttacacaaatcccaaatccaaagtgaaagacatgattgctttgttgtttgtcgaatctatcgacatatgatgatatataacaatgcagatgcaccttcaaccgagtattcagagcaaatatggaagcattttgtatggttctgtatgacctataggtcatatgttcgagtcatggaagcatccattaatacttgcattagggtaggctgtctatatcatacttattagggtgcgacccttcccctgactctgcatgaatgcaggatgctttgtgcgctcagctgcctttttttactatttcgctgtcagttatgtttgagaagggacaatacttgatttgattcatgcagtcttgtctccaggtttgattcctatg

SEQ ID NO: 184 - protein, 597 aa, Nicotiana tabacum
MSQSISPIFPRFAKFQSNIWRCSTFELRVIHSSYASIGGRRKERERRMKRAMNPSSSSRHLADFHSTIWGDHFLSYNSEITEITTQEKNEHEMLKEIVRKMLVETPDNSTQKLVLIDTIQRLGLAYHFNDEIENSIQNIFNLSQNSENDNEHNLYVAALRFRLARQQGYYMSSDVFKQFTNHDGKFKENHINDIQGLLSLYEATHMRVHDEEILEEALIFTTTHLESMIPNLSNSLKVQVTEASNQPIRKTIPRVGSRKYIYIYENIGTHNDLLVKFAKLDFNMLQELHRKELNELTSWWKEMDFATNFQYAKGRLVEAYFWMVGIYFEPQYSRSRRMITQVVNMNSIIDDTYDAFATFDELMLFTDAIQRWDVGAMDSLPAYLRPIYQGLLDVFNEMEEVMAKEGKADRIYYAKKEMKKLVAAYFKEVEWLNANYIPKCEEYMKNGVVSCTGRCMEQFALVVIEEIITKEAFEWLANEPLIPRAASTICRLMDDIVDHEVEQQRGHVASFVEYYMKEYGTSKQEAYVEMWKKITNAWKDINKELLRATAVPMFVLERTLDYTRLVDTCFKDDDGYTNPKSKVKDMIALLFVESIDI

SEQ ID NO: 185 - DNA, 2251 bp, Nicotiana tabacum
gctgccttttttttttttgggctacaaaactctaaagtaaaggaactagaaaactcgtttggcgagagaaagagagagatgagtcaatcaatttctccattaatgttttctcactttgcaaaatttcagtcgaatatttggagatgcaatacttctcaactcagagttatacactcatcatatgcctcttttggagggagaagaaaagagagagtaagaagaatgaatcgagcaatggatctttcttcaagctctcgtcatttggcagattttccctcaacaatttggggtgaccattttctctcctacaattctgaaataacagaaattactacccaagagaaaaatgaacatgaaatgctaaaagaaatagttcggaaaatgttggtagaaactccagataatagtacacaaaaactagtcttgattgacacaattcaaagattgggattagcatatcatttcaatgatgagattgaaaactccattcaaaacatctttaatttgtctcaaaatagtgaagatgacgatgaacacaacctttatgttgctgctcttcgttttcgacttgcgaggcaacaaggatattacatgtcttcagatgtgttcaagcaattcactaaccatgacggaaaattcaaggaaaatcatactaatgatgttcaaggattattgagtttgtatgaagcagcacatatgagagtgcacgacgaggaaattctagaagaagctcttatctttaccacgactcatctcgagtccgtgatcccgaatttgagcaactcgcttaaggtacaagttactgaagccttaagccatcctattcgcaaagctataccaagggtgggagcaaggaaatacatacacatatatgaaaacattggaacacataatgatttacttttgaaatttgcaaagttggacttcaacatgttacaaaagcttcatcgaaaagagcttaacgagctaacaagctggtggaaagatttggatcgtgcaaacaaatttccatatgcaaaggacagattagtagaagcttacttttggacggtgggaatatattttgaacctcaatatagtcgttcaagaagtttggtaacaaaagtagtcaaaatgaactccattattgatgacacttatgatgcttatgcaacttttgatgagcttgtgcttttcacggatgcgatccaaagatgggacgaaggtgccatggatttattaccgacatatctgagacctatttatcaaggccttctcgacgttttcaatgaaatggaagaagtattggccaaagaaggtaaagcagatcacatttactatgcgaaaaaagagatgaaaaaggtggcggaagtctattttaaggaagctgaatggttgaatgctaactacattccaaaatgcgaggagtatatgaaacatggacttgtaagctctaccggtccgatgtatggaataatttctttggttgttatggaggaaattataacaaaagaggcttttgaatggttgacaaatgaacctttgattcttcgacctgcatcaacaatttgtagattaatggatgatatggctgatcatgaagttgaacaacaaagaggacatgttgcttcatttgttgagtgctacatgaaagaatatggagtttcaaagcaagaagcatatgttgagatgcggaaaaaaatcacaaatgcgtggaaagatataaataaggaactcttgcgccctactgcagtaccaatgtttatcctcgaacgatctttaaatttttcaagattggccgatacatttttgaaagatgatgatggatacacaaatcccaaatccaaagttaaagacttgattgcttcgttgtttgtcgaatctgtcgacatatgattatatataacaatgcagacacaccttcaaagctgagtatttggagcaaatatggaagcattttgtattgtccatgtaaccctataagtcacgtgtttgggcaatggcaacatttactaatatttgcattatggtaggttgtttacatcacacctattgggggcgacccttcctaaaacctgacatgaatgtgtgatgctttgtgcacctggcggctcatttttactatttcactgttacaacttatttggacggttgttaacctattgaatcatgtagtattgttacttaaatacaatgtttattttaattattacttaaattttattctatcatatcgttaaatccatcattacgtaacaaaaaaaaaaaaaaa

SEQ ID NO: 186 - protein, 598 aa, Nicotiana tabacum
MSQSISPLMFSHFAKFQSNIWRCNTSQLRVIHSSYASFGGRRKERVRRMNRAMDLSSSSRHLADFPSTIWGDHFLSYNSEITEITTQEKNEHEMLKEIVRKMLVETPDNSTQKLVLIDTIQRLGLAYHFNDEIENSIQNIFNLSQNSEDDDEHNLYVAALRFRLARQQGYYMSSDVFKQFTNHDGKFKENHTNDVQGLLSLYEAAHMRVHDEEILEEALIFTTTHLESVIPNLSNSLKVQVTEALSHPIRKAIPRVGARKYIHIYENIGTHNDLLLKFAKLDFNMLQKLHRKELNELTSWWKDLDRANKFPYAKDRLVEAYFWTVGIYFEPQYSRSRSLVTKVVKMNSIIDDTYDAYATFDELVLFTDAIQRWDEGAMDLLPTYLRPIYQGLLDVFNEMEEVLAKEGKADHIYYAKKEMKKVAEVYFKEAEWLNANYIPKCEEYMKHGLVSSTGPMYGIISLVVMEEIITKEAFEWLTNEPLILRPASTICRLMDDMADHEVEQQRGHVASFVECYMKEYGVSKQEAYVEMRKKITNAWKDINKELLRPTAVPMFILERSLNFSRLADTFLKDDDGYTNPKSKVKDLIASLFVESVDI

SEQ ID NO: 187 - DNA, 3890 bp, Nicotiana tabacum
tttttttcaatgagaaaataagagttgctcaaacaatatcaagttacaaaaatttaattttaactgtaaaagttatatttttccaaaataacataaactatagtaattatatatagtttgaagtattaataaaatttaaatatgcaaaagttaattttaataaaccatttgtatgcctaacttgtagcctctaaactattttatttgctttatttatcaaactcatattttattttattgcaccttgttagttttggacgttaattatatatatttggtgtaaaatttaaaatatattaacatttgtggagaatttatgtatgcctggttcttaactatttttttttatataactggttagagtaatttcttatatttcagtatttatttttaaataagtcctcataaattgaagactttaaaagtttttgtgtcattcctctttttatttaagaaattgaagaattccgctaaatttcatatttccgctgttatttaactgtttatttcccttgttaatataattggtaagaagttttaaaataaaggagttaatgattttctaggttcatggcttgcctagcttctacgagtaagcgccatcacgactcccgaggataaggaaatccgggtcgtagcattcactcacaaaaattactaaaaacaaagtttacccttctcccaaaagtaaatttcatatttggctccacataatgtgttcaatgagtcaagtgaagtacttttcatgacaaaaaaaagttgctgaaaaatgcatatctcatattttttttttagagaaatcccatttcttgcctaaacgaaagcctataaaagagcatatattgcaacaacagtttgcagaaactatcaagtcaaataatcccccctttaattccctcccaaaatgcagttcttcaacttcttttcccttttcctttttgtgtcatttctctttttatttaagaaatggaagaattccaatagccaaaccaaaagattgcctccaggtccatggaaattacctattcttggaagcatgcttcatatgctaggtggacttccacatcatgtccttagagatttagccaaaaaatatggaccaattatgcaccttcaactaggcgaagtttctctggttgttattagttctcctgggatggcaaaagaagtactaaaaactcatgacctcgcttttgcaaataggcctttacttgtagctgccaagattttttcttataattgcatggacattgccttatctccttatggcaattactggagacaaatgcgtaaaatttgtctcttggaattgctcagtgccaaaaatgtcaagtcattcaactcaattagacaagatgaagttcatcgtatgattaaattttttcgatcatctcctggtaagccagttaatgttacaaaaaggatttcacttttcacaaactctatgacatgtagatcagcatttggacaagaatataaggagcaagacgaatttgtacaactagtcaaaaaagtgtcaaacttaatagaagggtttgatgtggctgatatattcccttcactgaagtttcttcatgtgctcactggaatgaaggctaaagttatgaatacacacaatgaattagatgccattcttgaaaatatcatcaatgagcacaagaagacttcaaaaagcgatggtgaatcaggaggtgaaggtataattggtgtactgctaagacttatgaaagagggaggccttcaatttccaatcactaacgacaacatcaaagctatcatttctgtacgtactatttactgcatatttctatcttcgttattagtactccttctatttctattttttgtggaacttgtttttatcctattccataaagaatgacgtatttctatataagaaataatttaactttaaattttctattttacctttaatgacatgtttttatagccacagcaatttcatgacatatttaataccacaagttcgaaaattatttctgtctttcttaaacttgtatctagttataccggccatataaagcgaaattgatgaagtattatgatttatctttaatactaacgttctcaaattgcataataaatttctgtacttaaagagtcactttagttagctttcaattaggacaacaaatcttatttaatctttccggctacgcgcttggactgcgtacgaaaatcaaagcaactttaaatgaggtttttcaaggcctcgaaaatacataatgggtaagaaaaacaggtgatgaccttttgggtcgtcatagaaaatttagaattccttttggtgtagaataaaggtagtagcacaacgtagtacaaataagttatttgaatatttcagtagaaatttgtcaagaagtttgtaagagaaatgaatattgtaacttgctcgaaaatgaaggacatctttggtgggggaacagaaacttcatcaacaacaattaattgggccatggtcgaaatgatgaagaatccaagtgtattttccaaagctcaagcagaggtaagagaaatcttgagagggaaagaaacttttggtgaaattgatgtcgaggagttcaaatacctaaagatggtcattaaagaaactttcagactgcatcctccactacctcttttgcttccaagagaatgtagagaagaaatagacttaaatggatacactattccattgaaaacaaaagtcgtggttaatgcttgggcaatgggaagagatccaaaatattgggatgacgtagaaagttttaaacccgagagatttgaacacaactctatggattatattggtaataattatgaatatcttccctttggtagcggaaggagaatttgccctggaatttcatttggtctagcaaatgtttattttccactggctcaactgttgaatcactttgactggaaactcccaactggaatcaatccaaggaattgtgacttgactgaggcggctggagcagcttgtgccagaaagaatgacctacacttgatcgctactgcttatcaacactgtgaagagtgatctcatggtgtcaaccttttcttaaaagaagaatctttgcaactgaatttcgttggcaaccccaccattgtactttcttccgttggtgtttacttatttgtaatatttgtgtcctttttcatattagatatatcattatagctttccacacaagctgtcaaataagattttctgttgtttttatattttgtaatgtagtgacatgctatccgtgtgaagtaaatatacttacttacatccctccattataaagaaaaagatactggagggatgccacaggtaggggtgggcatatttcggtcggaaccgaataaaccaaccgaaccgatttttttttatttcgcgtttcggttattcattttgttcgatcgatttcggtttttcggttcgattttcggttattaagttttttaattcagttaaccgaaaaaccgaattattaacatatatgttctttaagttatacataggctaagcccataggtaataaatcaatactattaggtccatctatcaaagactcaacccaattaagtaagtccatcaactttccaatcttaaagactttcagtctattaaaacttccatagcatattgcgatagataccgggagaatttcacacagagttgtaatttacactatgtttgaattttatgatcaatactatgcaaagtttagtctatttttttttttctataaacacaatatttccaacaatttcgaagttttgggaaaaatcaacaaattcgtcggtcgtattattacatagaaaggattccaatatgataatgttcaaaccaaaaaccgaaccaaaattagaataaccgaactgaaccgaactta

SEQ ID NO: 188 - protein, 499 aa, Nicotania tabacum
MQFFNFFSLFLFVSFLFLFKKWKNSNSQTKRLPPGPWKLPILGSMLHMLGGLPHHVLRDLAKKYGPIMHLQLGEVSLVVISSPGMAKEVLKTHDLAFANRPLLVAAKIFSYNCMDIALSPYGNYWRQMRKICLLELLSAKNVKSFNSIRQDEVHRMIKFFRSSPGKPVNVTKRISLFTNSMTCRSAFGQEYKEQDEFVQLVKKVSNLIEGFDVADIFPSLKFLHVLTGMKAKVMNTHNELDAILENIINEHKKTSKSDGESGGEGIIGVLLRLMKEGGLQFPITNDNIKAIISDIFGGGTETSSTTINWAMVEMMKNPSVFSKAQAEVREILRGKETFGEIDVEEFKYLKMVIKETFRLHPPLPLLLPRECREEIDLNGYTIPLKTKVVVNAWAMGRDPKYWDDVESFKPERFEHNSMDYIGNNYEYLPFGSGRRICPGISFGLANVYFPLAQLLNHFDWKLPTGINPRNCDLTEAAGAACARKNDLHLIATAYQHCEE

SEQ ID NO: 189 - DNA, 2624 bp, Oryza sativa Japonica
ggcaagcagcaggagctcatcattcatcccaatatctattgcatctgcaagagcgatcgagagagaaaaacaagatctatctatagcagctagctagctagcacaagaacgatatgccggtcttcactgcatcattccagtgtgtcaccttgtttgggcagccagcatcggcggccgacgcccagccattgctgcaagggcaacggccgttcctacaccttcacgctcgccgccgtcgaccatgcgggcccatgctaataagcaaatcaccgccgtacccggcctcggaagaaacacgcgaatgggaagcagatggacaacatgaacacacggatgaactaagagagacgacgacaaccatgatcgatggcatcaggacagcactgagatcaatcggagagggagagattagcatctcagcctatgacacttcgttggttgcccttctgaagaggctagatgggggtgatggtcctcagttcccatcaaccatcgactggatcgttcagaatcagctaccggatggttcatggggtaatgcctccttcttcatgatgggagaccggatcatgagcaccctcgcttgtgttgtagcgttgaagtcatggaacatccacaccgataaatgcgagagaggtttgttgtttatccaagaaaatatgtggaggttggcccatgaggaagaagactggatgctagttggatttgagattgccttgccctcgctcctagacatggctaaggacctggatcttgacatcccttacgatgagccagccttgaaagcaatatatgccgagagagaaaggaagcttgccaagattccaagagacgtgctacactctatgccaacaactttacttcatagccttgagggaatggttgacttggactgggaaaagctcctcaagctccggtgtctcgatgggtccttccattgctcccctgcttcgacggctactgctttccagcaaacaggagaccagaaatgctttgaatccctcgatggaatcgtcaaaaagttcaatggaggagttccctgtatctaccctttggatgtgtacgaacgcttatgggccgtcgataggctgacgaggctgggcatatcaaggcacttcacaagtgaaattgaggattgcttagactacattttcaggaactggactccagatggattagctcacacaaagaactgcccggtaaaggatatcgatgacacggccatgggtttccgtctcctccgactttacggataccaagtcgacccatgtgtgttgaagaagttcgaaaaggatggcaagttcttctgcttgcacggggagtccaacccatcctctgtcaccccaatgtacaacacttaccgggcctcccagctcaaatttcctggcgatgacggtgtccttgggcgagctgaggtgttttgccgctcattcctccaagacaggagaggctcaaacagaatgaaggacaagtgggccatcgccaaggatatcccaggcgaggttgagtatgctatggactacccatggaaagcaagtttaccgcgtattgaaacaaggttgtacttggatcaatatggaggtagtggcgatgtatgggggaaggtcctgcacaggatgactcttttctgcaacgacctgtacctcaaggcagctaaagctgacttcagtaatttccagaaagaatgccgagttgagttgaatggccttagaaggtggtacttgaggagtaatctggagaagtttggagggactgatccacagactacactgatgacatcctacttcttagcttcagccaacatcttcgaggcaaaccgagcagcggaacgtcttggatgggctcgcgtagcgttgcttgccgatgccgtctcctctcacttcaggagaatcgggggaccaaaaaattcgaccagcaatcttgaagagcttatcagccttgttccttttgacgacgcttattctggcagtcttcgtgaagcttggaagcagtggttgatggcatggactgcaaaggagagcagccaggagtcaattgaaggggacacggcaatattgttggttcgtgccatcgagatttttggaggacggcatgttttgaccgggcaaagaccggacctttgggagtattcccagctcgagcagctcacctcctccatctgctgcaaactttccaggagggttcttgcccaggagaatggggaaagtacggagaaagttgaggagatagaccagcaagtggatttggagatgcaggaattgactcggcgcgttctacagggctgcagcgctattaacagactaacccgggagacgtttctccatgtggtgaagagcttctgctatgtcgcctactgctcacctgagacaattgatagccacatcgacaaggtcatattccaagatgtgatttaggaacaaattaccccgactcatctacactccttataaaagagagtagtggtggtgttggttctgccacccccacctccactaccaattcccgacctttatagaataaagatgtgtcttttgtattaagtttgttgtggtgtacctcgtgtttttcctgagacggggtttaatttcgtggcgtttctgaaaaaaaaaaaaaaaaaaaaaaaa

SEQ ID NO: 190 - protein, 766 aa, Oryza sativa Japonica
MPVFTASFQCVTLFGQPASAADAQPLLQGQRPFLHLHARRRRPCGPMLISKSPPYPASEETREWEADGQHEHTDELRETTTTMIDGIRTALRSIGEGEISISAYDTSLVALLKRLDGGDGPQFPSTIDWIVQNQLPDGSWGNASFFMMGDRIMSTLACVVALKSWNIHTDKCERGLLFIQENMWRLAHEEEDWMLVGFEIALPSLLDMAKDLDLDIPYDEPALKAIYAERERKLAKIPRDVLHSMPTTLLHSLEGMVDLDWEKLLKLRCLDGSFHCSPASTATAFQQTGDQKCFESLDGIVKKFNGGVPCIYPLDVYERLWAVDRLTRLGISRHFTSEIEDCLDYIFRNWTPDGLAHTKNCPVKDIDDTAMGFRLLRLYGYQVDPCVLKKFEKDGKFFCLHGESNPSSVTPMYNTYRASQLKFPGDDGVLGRAEVFCRSFLQDRRGSNRMKDKWAIAKDIPGEVEYAMDYPWKASLPRIETRLYLDQYGGSGDVWGKVLHRMTLFCNDLYLKAAKADFSNFQKECRVELNGLRRWYLRSNLEKFGGTDPQTTLMTSYFLASANIFEANRAAERLGWARVALLADAVSSHFRRIGGPKNSTSNLEELISLVPFDDAYSGSLREAWKQWLMAWTAKESSQESIEGDTAILLVRAIEIFGGRHVLTGQRPDLWEYSQLEQLTSSICCKLSRRVLAQENGESTEKVEEIDQQVDLEMQELTRRVLQGCSAINRLTRETFLHVVKSFCYVAYCSPETIDSHIDKVIFQDVI

SEQ ID NO: 191 - DNA, 2523 bp, Oryza sativa indica
atggcgagtcctatggaagctgtagcccgttccagcctcgtgctcgcacctcgccggcggcgagccctcggcctcctcccggcggcggccgccccattcgtgctagattgtcgccggcggcataacggaggaatgcgtcgtcctcatgtcagcttcgcctgctcggccgagctcgacaccggtcgccggcagcttccttccacggggactcgagcggtgatgtcgtcctgtcccggatatgttgaggggaggatggtaggagaaaatacaagtcagataaacatgggacgggaggctagaatacgtaggcacttggagaacccggagttcttaccatcttcatatgacatagcatgggtggctatggtgccattgccgggcactgatcatcttcaagctccatgcttccctgaatgtgtggaatggatactacaaaaccaacacagtaatgggtcgtggggtgtcaatgaatttgactcatcagccagcaaggatattctcctatccactttggcatgtattattgcacttgagaaatggaatgtcggttcggagcaaataaggagaggattacattttatcgcaaagaatttctccattgttattgatgaccagattgctgcacctataggcttcaacctcacattccctgctatggttaaccttgccattaagatgggtttggaatttcctgccagtgaaattagtattgatcagattcttcacctccgtgatatggaattgaaaagactgtctggtgaggaatctttggggaaagaggcatatttcgcctatattgctgaaggtctagaagaaagcatggtggattggagtgaagttatgaagttccaggggaagaatggatcattgttcaactccccggctgcaactgctgctgcattagtccacagatacgatgataaagccctgggatacctatattctgttgtcaataaatttggaggtgaagtaccaaccgtgtatccgctaaatatattttctcagctttcaatggtggatactctcgtcaatattggaatatctcggcacttttctagtgatataaagcgcattttggataagacatacattttatggtcacagagagatgaggaagtaatgctggatttaccaacatgcgcaatggcatttcgccttttgcgtatgaacggatatggtgtttcctcagatgacttgtcccatgttgctgaagcctcaactttccataactcagttgaaggatacttagatgatacaaaatccttattagaattgtacaaagcttcaaaagtcagtttatcagaaaatgagccaatcctagagaaaatgggttgctggtcaggtagcttattgaaagaaaaattgtgctccgatgacatccgaggaacaccaatccttggagaggtagaatatgctctcaaatttccattttatgccacgctggaacctctagaccacaagtggaacattgaaaattttgatgccagggcttatcagaagataaagaccaaaaacatgccgtgccatgtcaatgaagatctcttggctttggctgctgaagatttcagcttttgtcagtcaacttaccaaaatgaaatccagcaccttgaaagttgggagaaagaaaataagctggaccagctcgaatttacgcggaagaatctaataaacagctatctctctgctgctgccaccataagcccttatgaattgtctgatgctcgcattgcgtgtgcaaaatctattgcgctcacacttgttgccgatgacttttttgatgtcggaagttccaaagaagaacaagaaaatctcatatccttagtcgagaagtgggatcagtatcataaagttgagttctactctgagaatgtaaaagcagtatttttcgctctatattctacggttaaccagcttggagcaatggcttccgcagtacagaaccgcgacgttacaaaatacaatgttgaatcgtggttggattatttgaggtctttagcgacagatgcagaatggcaacggagcaaatatgtgccaacaatggaggaatacatgaaaaattcaattgtgacattcgcattgggaccaactatactcatagcactgtatttcatgggacaaaatctctgggaggacatcgtgaaaaatgcagagtatgatgagttgtttagactaatgaacacatgtggtcgtctccagaatgatattcaaagctttgagagggaatgcaaggatggcaaactgaacagtgtgtcactgcttgttcttgacagcaaagatgtcatgtcagtagaagaggctaaagaggcgataaacgagtctatatcatcatgtagaagagagttgctacggttggttgttagagaagacggtgtcattcctaaatcatgcaaggagatgttctggaatctttacaagacaagccatgtgttctactctcaggccgatggattttcctcgccgaaggaaatgatgggtgctatgaatggagtaatctttgagccactgaaaactagaggcaactag

SEQ ID NO: 192 - protein, 840 aa, Oryza sativa indica
MASPMEAVARSSLVLAPRRRRALGLLPAAAAPFVLDCRRRHNGGMRRPHVSFACSAELDTGRRQLPSTGTRAVMSSCPGYVEGRMVGENTSQINMGREARIRRHLENPEFLPSSYDIAWVAMVPLPGTDHLQAPCFPECVEWILQNQHSNGSWGVNEFDSSASKDILLSTLACIIALEKWNVGSEQIRRGLHFIAKNFSIVIDDQIAAPIGFNLTFPAMVNLAIKMGLEFPASEISIDQILHLRDMELKRLSGEESLGKEAYFAYIAEGLEESMVDWSEVMKFQGKNGSLFNSPAATAAALVHRYDDKALGYLYSVVNKFGGEVPTVYPLNIFSQLSMVDTLVNIGISRHFSSDIKRILDKTYILWSQRDEEVMLDLPTCAMAFRLLRMNGYGVSSDDLSHVAEASTFHNSVEGYLDDTKSLLELYKASKVSLSENEPILEKMGCWSGSLLKEKLCSDDIRGTPILGEVEYALKFPFYATLEPLDHKWNIENFDARAYQKIKTKNMPCHVNEDLLALAAEDFSFCQSTYQNEIQHLESWEKENKLDQLEFTRKNLINSYLSAAATISPYELSDARIACAKSIALTLVADDFFDVGSSKEEQENLISLVEKWDQYHKVEFYSENVKAVFFALYSTVNQLGAMASAVQNRDVTKYNVESWLDYLRSLATDAEWQRSKYVPTMEEYMKNSIVTFALGPTILIALYFMGQNLWEDIVKNAEYDELFRLMNTCGRLQNDIQSFERECKDGKLNSVSLLVLDSKDVMSVEEAKEAINESISSCRRELLRLVVREDGVIPKSCKEMFWNLYKTSHVFYSQADGFSSPKEMMGAMNGVIFEPLKTRGN

SEQ ID NO: 193 - DNA, 2529 bp, Oryza sativa Japonica
atggcgagtcctatggaagctgtagcccgttccagcctcgtgctcgcacctcgccggcggcgagccctcggcctcctcccggcggcggcggcggccgccccattcgtgctagattgtcgccggcggcataacggaggaatgcgtcgtcctcatgtcagcttcgcctgctcggccgagctcgacaccggtcgccggcagcttccttccacggggactcgagcggtgatgtcgtcctgtcccggatatgttgaggggaggatggtaggagaaaatacaagtcagataaacatgggatgggaggctagaatacttaggcacttggagaacccggagttcttaccatcttcatatgacatagcatgggtggctatggtgccattgccgggcactgatcatcttcaagctccatgcttccctgaatgtgtggaatggatactacaaaaccaacacagtaatgggtcgtggggtgtcaatgaatttgactcatcagccagcaaggatattctcctatccactttggcatgtattattgcacttgagaaatggaatgtcggttcggagcaaataaggagaggattacattttatcgcaaagaatttctccattgttattggtgaccagattgctgcacctataggcttcaacctcacattccctgctatggttaaccttgccattaagatgggtttggaatttcctgccagtgaaattagtattgatcagattcttcacctccgtgatatggaattgaaaagactggctggtgacgaatctttggggaaagaggcatatttcgcctatattgctgaaggtctagaagaaagcatggtggattggagtgaagttatgaagttccaggggaagaatggatcactgttcaactccccggctgcaactgctgctgcattagtccacagatacgatgataaagccctgggatacctatattctgttgtcaataaatttggaggtgaagtaccaaccgtgtatccgctaaatatattttctcagctttcaatggtggatactctcgtcaatattggaatatctcggcacttttctagtgatataaagcgcattttggataagacatacattttatggtcacagagagatgaggaagtaatgctggatttaccaacatgcgcaatggcatttcgccttttgcgtatgaacggatatggtgtttcctcagatgacttgtcccatgttgctgaagcctcaactttccataactcagttgaaggatacttagatgatacaaaatccttattagaattgtacaaagcttcaaaagtcagtttatcagaaaatgagccaatcctagagaaaatgggttgctggtcaggtagcttattgaaagaaaaattgtgctccgatgacatccgaggaacaccaatccttcgagaggtagaatatgctctcaaatttccattttatgccacgctggagcctctagaccacaagtggaacattgaaaattttgatgccagggcttatcagaagataaagaccaaaaacatgccgtgccatgtcaatgaagatctcttggctttggctgctgaagatttcggcttttgtcagtcaacttaccaaaatgaaatccagcaccttgaaagttgggagaaagaaaataagctggaccagctcgaatttacgcggaagaatctaataaacagctatctctctgctgctgccaccataagcccttatgaattgtctgatgctcgcattgcgtgtgcaaaatctattgcgctcacacttgttgccgatgactttttcgatgtcggaagttccaaagaagaacaagaagatctcatatccttagtcgagaagtgggatcagtatcacaaagttgagttctactctgagaatgtaaaagcagtatttttcgctctatattctacggttaaccagcttggagcaatggcttccgcagtacagaaccgcgacgttacaaaatacaatgttgaatcgtggttggattatttgaggtctttagcgacagatgcagaatggcaacggagcaaatatgtgccaacaatggaggaatacatgaaaaattcaattgtgacattcgcattgggaccaactatactcatagcactgtatttcatgggacaaaatctctgggaggacatcgtgaaaaatgcagagtatgatgagttgtttagactaatgaacacatgtggtcgtctccagaatgatattcaaagctttgagagggaatgcaaggatggcaaactgaacagtgtgtcactgcttgttcttgacagcaaagatgtcatgtcagtagaagaggctaaagaggcgataaacgagtctatatcatcatgtagaagagagttgctacggttggttgttagagaagacggtgtcattcctaaatcatgcaaggagatgttctggaatctttacaagacaagccatgtgttctactctcaggccgatggattttcctcgccgaaggaaatgatgggtgctatgaatggagtaatctttgagccactgaaaactagaggcaactag

SEQ ID NO: 194 - protein, 842 aa, Oryza sativa Japonica
MASPMEAVARSSLVLAPRRRRALGLLPAAAAAAPFVLDCRRRHNGGMRRPHVSFACSAELDTGRRQLPSTGTRAVMSSCPGYVEGRMVGENTSQINMGWEARILRHLENPEFLPSSYDIAWVAMVPLPGTDHLQAPCFPECVEWILQNQHSNGSWGVNEFDSSASKDILLSTLACIIALEKWNVGSEQIRRGLHFIAKNFSIVIGDQIAAPIGFNLTFPAMVNLAIKMGLEFPASEISIDQILHLRDMELKRLAGDESLGKEAYFAYIAEGLEESMVDWSEVMKFQGKNGSLFNSPAATAAALVHRYDDKALGYLYSVVNKFGGEVPTVYPLNIFSQLSMVDTLVNIGISRHFSSDIKRILDKTYILWSQRDEEVMLDLPTCAMAFRLLRMNGYGVSSDDLSHVAEASTFHNSVEGYLDDTKSLLELYKASKVSLSENEPILEKMGCWSGSLLKEKLCSDDIRGTPILREVEYALKFPFYATLEPLDHKWNIENFDARAYQKIKTKNMPCHVNEDLLALAAEDFGFCQSTYQNEIQHLESWEKENKLDQLEFTRKNLINSYLSAAATISPYELSDARIACAKSIALTLVADDFFDVGSSKEEQEDLISLVEKWDQYHKVEFYSENVKAVFFALYSTVNQLGAMASAVQNRDVTKYNVESWLDYLRSLATDAEWQRSKYVPTMEEYMKNSIVTFALGPTILIALYFMGQNLWEDIVKNAEYDELFRLMNTCGRLQNDIQSFERECKDGKLNSVSLLVLDSKDVMSVEEAKEAINESISSCRRELLRLVVREDGVIPKSCKEMFWNLYKTSHVFYSQADGFSSPKEMMGAMNGVIFEPLKTRGN

SEQ ID NO: 195 - DNA, 2811 bp, Oryza sativa Japonica
ggtatacggaggagagcttttacaagaaggcagaaggccaccacgcggagctctctgctcttccattgctagttttgcttcatttccctgcctgtgagtggtgcaaggcaactacgatgctaccgagttccatatgctccatgggccaaatcccaagaacttcaccccattactatgggatgctgccaaagcagatgagcaaaggacatcctcctatggtcactagagcggtaggaggtgttgagaagggggaagtcggaggaaatgtacggagcctgcaagtcatgcacagcaaggaactccaagctaagataagaagacagttgcagagagttgaattatcaccatcgttatatgacacagcttgggtggctatggtgccggagcgtagttcttctcaagctccatgttatccgcagtgcattgagtggattctgcagaaccaacatgacgatggatcttggggtataaactcatcaagtttatcagtcaacaaagatattctcttgtctacattggcatgcgttgtcgcactcaagaagtggaatgcaggctcatatcacatcaagagaggtctaaattttgttggaagaaatttctccgttgcgatggatgttcaaaatatagctcctgtgggttttaacgttacattctctggtttaataacccttgcctctgggatgggtttgcaattacctgtttggcaaacagatattgatgaaatttttcacctccggaagatcgaattggaaagggattccggtggaacaatttcagcaaggaaagccttcatggcatatgtggcagaagggttcgggagccttcaagattgggatcaggtaatggcataccaaaggaagaatggatcattgttcaactcgccttcaacaacggcagctgcagcaatccatactttcaatgacaggacactcaattatttagattcacttacgaacaagtttggcggcccagtcccagcaatgtatccgcaaaacatatactcccagctttgtactgtggatgctcttgaaaggacagggatctctcagaaatttgcacgtgagataagagacatattggacacgacatacaggagctggctgcacaatgaggaggaggtgatgctggacataccaacatgtgcaatggcatttcgcctccttcgtactcatggctatgacatcacctcagatgaaatggctcatttttctgaacaatccagctttgatgattcaattcatggatatctcaatgatactaagactttgttggagttgttcaaaacttcacaaatccgtttctcatgtgaggatttggtcctcgaaaatattggtacttggtcagctaaactattgaagcaacaattattgtccaacaagttatcaacatcagcacagtcagaggtggaatatgtgcttaaatttcccctccattccaccttggaccgattagagcacaggagaaatatcgaacaattcaaggtcgagggttccaaggttctgaaatctggatactgtggctcccactcaaacgaagaaattctagctttggctgttgactacttccattccagccagtctgtttaccagcaagaactcaagtattttgagagttgggtgaaacagtgcaggctagacgagctgaagttcgcaagagtgatgccattgatcgtccatttcagctctgctgccaccatcttcgctcctgagcttgctgatgcccgaatggtacttagccagacctgcatgctgataactgtgtatgatgacttcttcgactgtcctgaaatatcgagagaagagaaggagaactacatcgcgctgattgagaagtgggataaccacgctgagattgggttttgctccaagaatgtagagattgttttctatgcggtttacaacacgtacaagcagattggggaaaaggccgcattgaaacaaaatcgcagcataatggatcagctagtggaggatttggtgagctcagcgaaggccatgatggtcgaggcagattggacagcaaccaagtacatcccggcgacaatggaggagtacatgtcaaacgcagaggtgtctggagcgtttgcctccttcgtctgtccaccgttatactttctcgggctgaaactgtctgaggaggatgtcaagagtcatgaatacactcaactgctcaagttgaccaacgtcatcggccgcctccagaatgactcccagacatacaggaaggagatcctggcggggaaggtgaacagcgtcttgctgcgtgctctcactgacagcggcaatacctcgccagagtccattgaggcagccaaggaaatagtaaatagagatgccgagtcatccatggtggagatgcggagtttggtgtttagcgagggtggccctattcctcgtccatgcaaggatcgcttctgggagatgtgtaagattgtgttctacttctacagtgaagatgacgcctaccgcacacctaaggagacgatgagctcggcaagggcagtgattctcgatccattgaggttgatacctcctccatcttgcccagaaacgttgtcctcatgaacaaccaccttgattggtttgtgtacaagaggttatttgaatttttagtatgcctaagtcctcaatatctttagacgtgttctagactctgtgtatggacgtgagtgcatgtgagagtccatcttgtacttaaaaaaaataattgcatgcacttatgatgtcttaaaccttggaaattgaggagaaagtttgatggaaaaaaatatgataagaacttatgagatatggcttttgctacaaccatatg

SEQ ID NO: 196 - protein, 815 aa, Oryza sativa Japonica
MLPSSICSMGQIPRTSPHYYGMLPKQMSKGHPPMVTRAVGGVEKGEVGGNVRSLQVMHSKELQAKIRRQLQRVELSPSLYDTAWVAMVPERSSSQAPCYPQCIEWILQNQHDDGSWGINSSSLSVNKDILLSTLACVVALKKWNAGSYHIKRGLNFVGRNFSVAMDVQNIAPVGFNVTFSGLITLASGMGLQLPVWQTDIDEIFHLRKIELERDSGGTISARKAFMAYVAEGFGSLQDWDQVMAYQRKNGSLFNSPSTTAAAAIHTFNDRTLNYLDSLTNKFGGPVPAMYPQNIYSQLCTVDALERTGISQKFAREIRDILDTTYRSWLHNEEEVMLDIPTCAMAFRLLRTHGYDITSDEMAHFSEQSSFDDSIHGYLNDTKTLLELFKTSQIRFSCEDLVLENIGTWSAKLLKQQLLSNKLSTSAQSEVEYVLKFPLHSTLDRLEHRRNIEQFKVEGSKVLKSGYCGSHSNEEILALAVDYFHSSQSVYQQELKYFESWVKQCRLDELKFARVMPLIVHFSSAATIFAPELADARMVLSQTCMLITVYDDFFDCPEISREEKENYIALIEKWDNHAEIGFCSKNVEIVFYAVYNTYKQIGEKAALKQNRSIMDQLVEDLVSSAKAMMVEADWTATKYIPATMEEYMSNAEVSGAFASFVCPPLYFLGLKLSEEDVKSHEYTQLLKLTNVIGRLQNDSQTYRKEILAGKVNSVLLRALTDSGNTSPESIEAAKEIVNRDAESSMVEMRSLVFSEGGPIPRPCKDRFWEMCKIVFYFYSEDDAYRTPKETMSSARAVILDPLRLIPPPSCPETLSS

SEQ ID NO: 197 - DNA, 2463 bp, Oryza sativa Japonica
atgatgctgctgagttcctcctactccggcggacaattccccggagtttcaccccttgggacgcgaccaaagagatccaccacagtagtgcctcgtccagtggtcacaagagcaggtggtgtgaggaataacctggaagtagtgggaaatgcaggaaccctgcaaggcatggacatagatgaactgcgggtgatagtgaggaagcagctgcagggagttgagttatcaccatcttcatacgacacggcatgggtggccatggtgccagtgcaggggtctcgtcagtctccatgcttcccgcagtgcgtcgagtggatacttcagaaccaacaggaggacggatcatggggccattctgcagggccatcaggagaggtaaacaaagatattctattgtctacattggcatgtgttcttgcactcaacatatggaatgttggtcaagatcacatcaggagaggactgagtttcattggaagaaatttctcggttgccattgatgggcaatgtgccgctcctgtcggttttaacattacattttctggtatgcttcgccttgccattgggatgggtttgaaattccctgttatggaaacggatatcgatagtatatttcgcctccgggaggtcgaatttgaaagggatgctggtggcacagcttcagcaaggaaagccttcatggcatatgtatcagaagggttggggagagaacaagattgggatcatgtaatggcatatcaaaggaagaacggttcattgttcaactcgccttccacaacagcagcgtcagcgatccacagctgcaatgacagagctctagactatttggtctctcttacatccaaattgggtggcccagtgccagcgatatatccagacaaggtatactcccagctctgcatggtggatacccttgagaagatggggatctcttctgattttgcttgcgacatacgcgacatattggacatgacctacagttgctggatgcaagatgaggaggagatcatgttggatatggcaacgtgtgcaaaggcatttcgcctccttcgtatgcacggttatgacgtcagctcagagggaatggctcgatttgctgaacgatctagcttcgatgattcaattcatgcatatctcaatgacactaagcccttgctggagttgtacaaaagttcacaagttcacttcttggaagaagatttcatactagagaatatcggttcctggtcagctaaattactcaagcaacaactctcgttcaacaagatatcgaaatcattaatgccagaggttgagtatgcccttaaatatcccttctatgcaaccgtggaagtactagagcacaaggggaacatagagcgattcaacgtaaacggcttccagcgtctgaaatctggatactgcggctccggggcagacaaagaaattctagctttggctgtcaataaattccactacgcccagtctgtttaccaacaagaactccggtatctcgagagctgggtggcagaatttaggctggacgagctgaaattcgcgagagtgattccactgcagtcgcttttgtctgctgttgtccccttgttcccctgcgagttgtccgatgcccgcattgcttggagccagaacgccatactgacggctgtggttgatgacttgttcgacggcggagggtccatggaggagatgctgaatttggtcgcgttattcgacaaatgggacgatcacggtgagattggcttctgctccagcaacgtagagattatgttcaatgctgtttacaacacgaccaagcgtatcggcgcaaaggccgcactggtgcagaagcgttgtgtcatcgatcatattgccgagcaatggcaggtgatggtgagggccatgctgaccgaggcagagtgggcggcgggcaagcacatcccggcaacaatgggggagtacatgtcggtggcggagccgtcgttcgcgttgggccccatcgtccccgtgtcggcgtacctgctcggggaggagctgccggaggaggcggtgcggagcccggagtacggccgtctcctggggctcgccagcgccgtgggccgcctcctgaacgacgtgatgacctacgagaaggagatgggcaccgggaagctcaacagcgtcgtgctgctgcaacctctcgccgccggcggcgccgcctctcgcggcggcggcggcgctccggctccggctccggcgtccgtcgaggcggccagggcggaggtgcggagggccatccaggcgtcgtggagggacctgcatgggctggtgttcggatcaggcggcggcagcagcagcagcatcattccccggccgtgcagggaggtcttctggcacaccgggaaggtggccagcgtcttctaccaggagggagacggctacgcacggaaggcaatgcggagcatggccaacgcggtgattctggagccactgcacctgcaagagtaa

SEQ ID NO: 198 - protein, 820 aa, Oryza sativa Japonica
MMLLSSSYSGGQFPGVSPLGTRPKRSTTVVPRPVVTRAGGVRNNLEVVGNAGTLQGMDIDELRVIVRKQLQGVELSPSSYDTAWVAMVPVQGSRQSPCFPQCVEWILQNQQEDGSWGHSAGPSGEVNKDILLSTLACVLALNIWNVGQDHIRRGLSFIGRNFSVAIDGQCAAPVGFNITFSGMLRLAIGMGLKFPVMETDIDSIFRLREVEFERDAGGTASARKAFMAYVSEGLGREQDWDHVMAYQRKNGSLFNSPSTTAASAIHSCNDRALDYLVSLTSKLGGPVPAIYPDKVYSQLCMVDTLEKMGISSDFACDIRDILDMTYSCWMQDEEEIMLDMATCAKAFRLLRMHGYDVSSEGMARFAERSSFDDSIHAYLNDTKPLLELYKSSQVHFLEEDFILENIGSWSAKLLKQQLSFNKISKSLMPEVEYALKYPFYATVEVLEHKGNIERFNVNGFQRLKSGYCGSGADKEILALAVNKFHYAQSVYQQELRYLESWVAEFRLDELKFARVIPLQSLLSAVVPLFPCELSDARIAWSQNAILTAVVDDLFDGGGSMEEMLNLVALFDKWDDHGEIGFCSSNVEIMFNAVYNTTKRIGAKAALVQKRCVIDHIAEQWQVMVRAMLTEAEWAAGKHIPATMGEYMSVAEPSFALGPIVPVSAYLLGEELPEEAVRSPEYGRLLGLASAVGRLLNDVMTYEKEMGTGKLNSVVLLQPLAAGGAASRGGGGAPAPAPASVEAARAEVRRAIQASWRDLHGLVFGSGGGSSSSIIPRPCREVFWHTGKVASVFYQEGDGYARKAMRSMANAVILEPLHLQE

SEQ ID NO: 199 - DNA, 2493 bp, Oryza sativa indica
atgatgctgctaggttccccttcgtccggcggctacggcggaaaattcgccggagcttcaccggccggtgggacgacgaccatggcgccgtcagcaaagcagccgagcagcagagctcctcctcctgggatcactggagggcgcaatgacctgcgaattctttcgccagcagcagcagcagcagctgttggaggtcttgagatgaagaagccggaagcagaggggattgcagagagcctgcaagcgacgcacaggaaagaactcgaggcaagtataaggaagcagctccaaggagtggaattatcaccatccccatatgacactgcatgggtggctatggtgccactccggggttcgtctcacaatccaagcttccctcaatgcgtcgactggatactagagaatcaatgggacgatggatcatggagtattgacgggtccatatccacagccaacaaagatgtcctatcatctacgctagcatgtgttctggcactcaacaaatggaatgttggtagggagcacatcaggagaggactaagtttcattggaagaaatttctcgattgcgatggatgatcaagcagttgctcctataggtttcggcatcactttcccagctatgctaacccttgccaatgggtccggcttggaagtccccgtcagacaaaacgatattgatagtcttaatcaccttcgggagatgaaaatacaaagagaggccgggaaccattctcgtggaagaaaggcctatatggcctatctggcagaaggatttgggaaccttctggagtgggatgaaatcatgatgttccagaggaagaacgggtcattgttcaactgtccttcttcaactgctggcgcattagccaattaccacgacgataaagctctccaatacttgcaatctctagtcaataaatttgacggtgtagtgccaacactgtatccactaaacatatattgtcagctttcaatggtggatgcgcttgaaaacatgggaatatctcagtattttgccagtgaaataaagagcatccttgacatgacatacagttcctggttagggagagatgaggaaatcatgttagacgtaacaacgtgcgcaatggcatttcgccttttaagaatgaacggttacgatgtttcctcagatgagctatctcatgttgctggagcttcaggcttccgtgattcgcttcaagggtatctaaacgatagaaaatctgtactggaagtatacaagacctcgaaacacagtatatcagaaaatgatttgatcttagatagcataggctcttggtcaggcagcctattgaaggaaatgctgtgctctaatgggatccaaggaactccaggccgtgaagagatcgagtttgctctgaagtatcccttctacagcacattggaacgtctagtccacaggaagaacattgtgcttttcgacgctaagggctcccagatgctgaaaacagagtgcatgcctgttcatgacagtcaagattttctagctttggctgtcgatgatttctgcatctctcaatctaattaccagaatgaactgaattatctcgaaagttgggtgaaagacaacagactcgaccagctacatttcgcacggcagaagataacatattgctatctctctggtgctgccaccacattccgtcctgaaatgggctacgctcgcacctcgtgggcaagaaccgcttggttgacggctgttatcgacgatcttttcgatgttggtggattagaacaagaacaagaaaacctcctagcattaatggagaagtgggaagagcctggtgaagatgagtactactctgaggatgtaaagatcgtgttccaggctctttataatacggtgaacgagattggcgcaaaggcttccgcgttacaaggccatgatgttaccaagtacctagtagacgtatggctacatgtggtgaggtgtatgaaggttgaggcagaatggcagaggagccagcatctgccaacgttcgaagaatacatggaaagtggtatggtgtcacttggacagggcgctacggtgatgtcggcattgtttctgatcggagaaaagctcccggagggtgttgtcgaacttgaagaatacgatgagatgttcaggctgatgggcacttgcggccgtctcctgaatgacattcgaggcattgagagggaggagtcggacggcaaaatgacgaacggcgtctcgctgctcgtccacgctagcggcggctccatgtccgtagacgaggccaaaaccgaagtgatgaagcgcatcgacgcctcacggaggaagctgctgagcttggtcgtcggcgagcaggaaggccctatcccgaggccgtgcaagcagctgttctggaagatgtgcaagattcttcacctgttctactaccagaccgacggattcagttctcccaaagagatggtcagcgcggtggatgcggtcatcaaggagccacttcaactcagattattgtag

SEQ ID NO: 200 - protein, 830 aa, Oryza sativa indica
MMLLGSPSSGGYGGKFAGASPAGGTTTMAPSAKQPSSRAPPPGITGGRNDLRILSPAAAAAAVGGLEMKKPEAEGIAESLQATHRKELEASIRKQLQGVELSPSPYDTAWVAMVPLRGSSHNPSFPQCVDWILENQWDDGSWSIDGSISTANKDVLSSTLACVLALNKWNVGREHIRRGLSFIGRNFSIAMDDQAVAPIGFGITFPAMLTLANGSGLEVPVRQNDIDSLNHLREMKIQREAGNHSRGRKAYMAYLAEGFGNLLEWDEIMMFQRKNGSLFNCPSSTAGALANYHDDKALQYLQSLVNKFDGVVPTLYPLNIYCQLSMVDALENMGISQYFASEIKSILDMTYSSWLGRDEEIMLDVTTCAMAFRLLRMNGYDVSSDELSHVAGASGFRDSLQGYLNDRKSVLEVYKTSKHSISENDLILDSIGSWSGSLLKEMLCSNGIQGTPGREEIEFALKYPFYSTLERLVHRKNIVLFDAKGSQMLKTECMPVHDSQDFLALAVDDFCISQSNYQNELNYLESWVKDNRLDQLHFARQKITYCYLSGAATTFRPEMGYARTSWARTAWLTAVIDDLFDVGGLEQEQENLLALMEKWEEPGEDEYYSEDVKIVFQALYNTVNEIGAKASALQGHDVTKYLVDVWLHVVRCMKVEAEWQRSQHLPTFEEYMESGMVSLGQGATVMSALFLIGEKLPEGVVELEEYDEMFRLMGTCGRLLNDIRGIEREESDGKMTNGVSLLVHASGGSMSVDEAKTEVMKRIDASRRKLLSLVVGEQEGPIPRPCKQLFWKMCKILHLFYYQTDGFSSPKEMVSAVDAVIKEPLQLRLL

SEQ ID NO: 201 - DNA, 1320 bp, Taxus cuspidata
atggagaagacagatttacacgtaaatctgattgagaaagtgatggttgggccatccccgcctctgcccaaaaccaccctgcaactctcctccatagacaacctgccaggggtaagaggaagcattttcaatgccttgttaatttacaatgcctctccctctcccaccatgatctctgcagatcctgcaaaaccaattagagaagctctcgccaagatcctggtttattatcccccttttgctgggcgcctcagagagacagaaaatggggatctggaagtggaatgcacaggggagggtgctatgtttttggaagccatggcagacaatgagctgtctgtgttgggagattttgatgacagcaatccatcatttcagcagctacttttttcgcttccactcgataccaatttcaaagacctctctcttctggttgttcaggtaactcgttttacatgtggaggctttgttgttggagtgagtttccaccatggtgtatgtgatggtcgaggagcggcccaatttcttaaaggtttggcagagatggcacggggagaggttaagctctcattggaaccaatatggaatagggaactagtgaagcttgatgaccctaaataccttcaattttttcactttgaattcctacgagcgccttcaattgttgagaaaattgttcaaacatattttattatagattttgagaccataaattatatcaaacaatctgttatggaagaatgtaaagaattttgctcttcattcgaagttgcatcagcaatgacttggatagcaaggacaagagcttttcaaattccagaaagtgagtacgtgaaaattctcttcggaatggacatgaggaactcatttaatccccctcttccaagcggatactatggtaactccattggtaccgcatgtgcagtggataatgttcaagacctcttaagtggatctcttttgcgtgctataatgattataaagaaatcaaaggtctctttaaatgataatttcaagtcaagagctgtggtgaagccatctgaattggatgtgaatatgaatcatgaaaacgtagttgcatttgctgattggagccgattgggatttgatgaagtggattttggttgggggaatgcggtgagtgtaagccctgtgcaacaacagtctgcgttagcaatgcaaaattattttcttttcctaaaaccttccaagaacaagcccgatggaatcaaaatattaatgtttctgcccctatcaaaaatgaagtcattcaaaattgaaatggaagccatgatgaaaaaatatgtggctaaagtatga

SEQ ID NO: 202 - protein, 439 aa, Taxus cuspidata
MEKTDLHVNLIEKVMVGPSPPLPKTTLQLSSIDNLPGVRGSIFNALLIYNASPSPTMISADPAKPIREALAKILVYYPPFAGRLRETENGDLEVECTGEGAMFLEAMADNELSVLGDFDDSNPSFQQLLFSLPLDTNFKDLSLLVVQVTRFTCGGFVVGVSFHHGVCDGRGAAQFLKGLAEMARGEVKLSLEPIWNRELVKLDDPKYLQFFHFEFLRAPSIVEKIVQTYFIIDFETINYIKQSVMEECKEFCSSFEVASAMTWIARTRAFQIPESEYVKILFGMDMRNSFNPPLPSGYYGNSIGTACAVDNVQDLLSGSLLRAIMIIKKSKVSLNDNFKSRAVVKPSELDVNMNHENVVAFADWSRLGFDEVDFGWGNAVSVSPVQQQSALAMQNYFLFLKPSKNKPDGIKILMFLPLSKMKSFKIEMEAMMKKYVAKV

SEQ ID NO: 203 - DNA, 26 bp, Artificial Sequence
  PCR Forward primer TS gene
caccatggcttcagctctcatttaat

SEQ ID NO: 204 - DNA, 30 bp, Artificial Sequence
  PCR Reverse primer TS gene
tcatacttgaattggatcaatataaacttt

SEQ ID NO: 205 - DNA, 25 bp, Artificial Sequence
  PCR Forward primer T5H gene
caccatggacgccctgtataagagc

SEQ ID NO: 206 - DNA, 26 bp, Artificial Sequence
  PCR Reverse primer T5H gene
ctatggtctcggaaacagtttaatgg

SEQ ID NO: 207 - DNA, 26 bp, Artificial Sequence
  PCR Forward primer T10H gene
caccatggatgcccttaagcaattgg

SEQ ID NO: 208 - DNA, 26 bp, Artificial Sequence
  PCR Reverse primer T10H gene
ttaggatctcggaaaaagttttatgg

SEQ ID NO: 209 - DNA, 26 bp, Artificial Sequence
  PCR Forward primer T13H gene
caccatggatgcccttaagcaattgg

SEQ ID NO: 210 - DNA, 26 bp, Artificial Sequence
  PCR Reverse primer T13H gene
ttaagatctggaatagagtttaatgg

SEQ ID NO: 211 - DNA, 26 bp, Artificial Sequence
  PCR Forward primer TAT gene
caccatggagaagacagatttacacg

SEQ ID NO: 212 - DNA, 27 bp, Artificial Sequence
  PCR Reverse primer TAT gene
tcatactttagccacatattttttcat

SEQ ID NO: 213 - DNA, 12114 bp, Artificial Sequence
  pTHUBIgateway vector
gggcgaattgggcccatttaaatacctgtttagttaacacaagcaacaaattatactttcgcctatcaggacgccaattacaaagcaacctaactagtactagtcatgcaagtcaaatccttatcttccgatagtgtgcaaccaaataccgaccctgcacctatcgaagacacagcgatcatatcaaatcacaatttgacatgtcaagatgcaaacttgttatctacacaaaattgacctaagatataattaagcctatagagctccatatcataggcttactcatgaaaacatcaactcacggactgtcgtctttcaagaagaacgttagcatgaatgttccacaataaacaaaaagaaaagtttagaagtaaggacagataccatcgacactggagaaaatagccatccgtagacgatgcctcggtaacatcttcaggagaaagactcgaatctccccgtcgcaacagcacataggccgacaactcgcagcctacaatgggaatgtcggtcgggaggtgcacccgcactacactcagcattcttccccgctttcgccccctcccttatctccagctccgcttaagatgatactcacgcttttgtacttcggctctttcacttccagacgaatttcatgaaaagttacatgtgcttgaggccgatcagccatcaggcgccccctgtgcgcgccagcgttctcccctcaacctcgccccctctcactctttgaaaagtgtgtgtctaaatctggcagtggcgatccctcgaaacctaaaactcttgcgaaacataagtaacttaagttttcctctacaaaacttgcaagtacgacatgcacccacacaagtgcaacacggacgcctcttgttttctctacattctcatagtagaacatgagattcctctcagaaacgcattccctccattcacttaatcccctgttccacgcgtgtcaggagtactcttgcaatcataaagcgatggcttggtcattcaacacttggtagcttcctgcaaataaaccctaaagttgtcagagcacttgaggagaagctcttccctcactccacctattcacactacctttccacttgagaaggacagctgctgcagcaaacccccaaaaaaaaatagggagcgggaggggaacaataaatgcattacctaaaccacgcaaccatctctcatcgaacaagcctcaccgcaacgcagactcttcctccaacacccctcaccattctaacaagactacaaacccatgctccatacaagcaacaaaacaactctgttagagcgacgaaatgatggcgccaatcgaattcccgcggccgccatggcggccgggagcatgcgacgtcgggcccgacgtcgcatgctcccggccgccatggcggccgcgggaattcctgcagcccggccgctaataacttcgtatagcatacattatacgaagttatattctagaggccgggggatcgtaccctcgactctagaggatctcctttgccccggagattacaatggacgacttcctctatctctacgatctaggaagaaagttcgacggtgaaggtgacgatactatgttcaccactgataatgagaagattagcctcttcaatttcagaaagaacgctaacccacagatggttagagaggcctacgcagcaggtctcattaagacgatctacccgagtaataatctccaggagatcaaataccttcccaagaaggttaaagatgcagtcaaaagattcaggactaactgcatcaagaacacagagaaagatatatttctcaagatcagaagtactattccagtatggacgattcaaggcttgcttcataaaccaaggcaagtaatagagattggagtctctaaaaaagtagttcctactgaatcaaaggccatggagtcaaagattcaaatcgaggatctaacagaactcgccgtgaaaactggcgaacagttcatacagagtctcttacgactcaatgacaagaagaaaatcttcgtcaacatggtggagcacgacactctggtctactccaaaaatatcaaggatacagtctcagaagaccaaagggcaattgagactttccaacaaagggtaatttcgggaaacctcctcggattccattgcccagctatctgtcacttcatcatgaagacagtagaaaaggaaggtggcacctacaaatgccatcattgcgataaaggaaaggctatcgttcaagatgcctctgccgacagtggtcccaaagatggacccccacccacgaggagcatcgtggaaaaagaagacgttccaaccacgtcttcaaagcaagtggattgatgtgatatctccactgacgtaagggatgacgcacaatcccactatccttcgcaagacccttcctctatataaggaagttcatttcatttggagaggacacgctgaaatcaccagtctctctctacaaatctatctctctctataaggatcccggggggcaatgagatatgaaaaagcctgaactcaccgcgacgtctgtcgagaagtttctgatcgaaaagttcgacagcgtctccgacctgatgcagctctcggagggcgaagaatctcgtgctttcagcttcgatgtaggagggcgtggatatgtcctgcgggtaaatagctgcgccgatggtttctacaaagatcgttatgtttatcggcactttgcatcggccgcgctcccgattccggaagtgcttgacattggggaattcagcgagagcctgacctattgcatctcccgccgtgcacagggtgtcacgttgcaagacctgcctgaaaccgaactgcccgctgttctgcagccggtcgcggaggccatggatgcgatcgctgcggccgatcttagccagacgagcgggttcggcccattcggaccgcaaggaatcggtcaatacactacatggcgtgatttcatatgcgcgattgctgatccccatgtgtatcactggcaaactgtgatggacgacaccgtcagtgcgtccgtcgcgcaggctctcgatgagctgatgctttgggccgaggactgccccgaagtccggcacctcgtgcacgcggatttcggctccaacaatgtcctgacggacaatggccgcataacagcggtcattgactggagcgaggcgatgttcggggattcccaatacgaggtcgccaacatcttcttctggaggccgtggttggcttgtatggagcagcagacgcgctacttcgagcggaggcatccggagcttgcaggatcgccgcggctccgggcgtatatgctccgcattggtcttgaccaactctatcagagcttggttgacggcaatttcgatgatgcagcttgggcgcagggtcgatgcgacgcaatcgtccgatccggagccgggactgtcgggcgtacacaaatcgcccgcagaagcgcggccgtctggaccgatggctgtgtagaagtactcgccgatagtggaaaccgacgccccagcactcgtccgagggcaaaggaatagagtagatgccgaccgggatcctaatgtgtgagtagtttcccgataagggaaattagggttcttatagggtttcgctcatgtgttgagcatataagaaacccttagtatgtatttgtatttgtaaaatacttctatcaataaaatttctaattcctaaaaccaaaatccagtactaaaatccagatccccgggtacgatcccccggccgctaataacttcgtatagcatacattatacgaagttatattctagggccgccaccatcgaattcgcggccgcctgcaggtcgaaacccgatctagtaacatagatgacaccgcgcgcgataatttatcctagtttgcgcgctatattttgttttctatcgcgtattaaatgtataattgcgggactctaatcataaaaacccatctcataaataacgtcatgcattacatgttaattattacatgcttaacgtaattcaacagaaattatatgataatcatcgcaagaccggcaacaggattcaatcttaagaaactttattgccaaatgtttgaacgatcttggagtaggggtaccgggccccccctcgaggtcgacggtatcgataagcttgatatcgaattcctgcagcccgtacaccactttgtacaagaaagctgaacgagaaacgtaaaatgatataaatatcaatatattaaattagattttgcataaaaaacagactacataatgctgtaaaacacaacatatccagtcactatggtcgacctgcagactggctgtgtataagggagcctgacatttatattccccagaacatcaggttaatggcgtttttgatgtcattttcgcggtggctgagatcagccacttcttccccgataacggagaccggcacactggccatatcggtggtcatcatgcgccagctttcatccccgatatgcaccaccgggtaaagttcacgggagactttatctgacagcagacgtgcactggccagggggatcaccatccgtcgcccgggcgtgtcaataatatcactctgtacatccacaaacagacgataacggctctctcttttataggtgtaaaccttaaactgcatttcaccagcccctgttctcgtcagcaaaagagccgttcatttcaataaaccgggcgacctcagccatcccttcctgattttccgctttccagcgttcggcacgcagacgacgggcttcattctgcatggttgtgcttaccagaccggagatattgacatcatatatgccttgagcaactgatagctgtcgctgtcaactgtcactgtaatacgctgcttcatagcatacctctttttgacatacttcgggtatacatatcagtatatattcttataccgcaaaaatcagcgcgcaaatacgcatactgttatctggcttttagtaagccggatccacgcgtttacgccccgccctgccactcatcgcagtactgttgtaattcattaagcattctgccgacatggaagccatcacaaacggcatgatgaacctgaatcgccagcggcatcagcaccttgtcgccttgcgtataatatttgcccatggtgaaaacgggggcgaagaagttgtccatattggccacgtttaaatcaaaactggtgaaactcacccagggattggctgagacgaaaaacatattctcaataaaccctttagggaaataggccaggttttcaccgtaacacgccacatcttgcgaatatatgtgtagaaactgccggaaatcgtcgtggtattcactccagagcgatgaaaacgtttcagtttgctcatggaaaacggtgtaacaagggtgaacactatcccatatcaccagctcaccgtctttcattgccatacggaattccggatgagcattcatcaggcgggcaagaatgtgaataaaggccggataaaacttgtgcttatttttctttacggtctttaaaaaggccgtaatatccagctgaacggtctggttataggtacattgagcaactgactgaaatgcctcaaaatgttctttacgatgccattgggatatatcaacggtggtatatccagtgatttttttctccattttagcttccttagctcctgaaaatctcgacggatcctaactcaaaatccacacattatacgagccggaagcataaagtgtaaagcctggggtgcctaatgcggccgccaatatgactggatatgttgtgttttacagtattatgtagtctgttttttatgcaaaatctaatttaatatattgatatttatatcattttacgtttctcgttcagcttttttgtacaaacttgtgattacgggggatccactagttctagagcggccgccaccgcggtggagctcgaattaacttggcactggcgcagaagtaacaccaaacaacagggtgagcatcgacaaaagaaacagtaccaagcaaataaatagcgtatgaaggcagggctaaaaaaatccacatatagctgctgcatatgccatcatccaagtatatcaagatcaaaataattataaaacatacttgtttattataatagataggtactcaaggttagagcatatgaatagatgctgcatatgccatcatgtatatgcatcagtaaaacccacatcaacatgtatacctatcctagatcgatatttccatccatcttaaactcgtaactatgaagatgtatgacacacacatacagttccaaaattaataaatacaccaggtagtttgaaacagtattctactccgatctagaacgaatgaacgaccgcccaaccacaccacatcatcacaaccaagcgaacaaaaagcatctctgtatatgcatcagtaaaacccgcatcaacatgtatacctatcctagatcgatatttccatccatcatcttcaattcgtaactatgaatatgtatggcacacacatacagatccaaaattaataaatccaccaggtagtttgaaacagaattaattctactccgatctagaacgaccgcccaaccagaccacatcatcacaaccaagacaaaaaaaagcatgaaaagatgacccgacaaacaagtgcacggcatatattgaaataaaggaaaagggcaaaccaaaccctatgcaacgaaacaaaaaaaatcatgaaatcgatcccgtctgcggaacggctagagccatcccaggattccccaaagagaaacactggcaagttagcaatcagaacgtgtctgacgtacaggtcgcatccgtgtacgaacgctagcagcacggatctaacacaaacacggatctaacacaaacatgaacagaagtagaactaccgggccctaaccatggaccggaacgccgatctagagaaggtagagagggggggggggggaggacgagcggcgtaccttgaagcggaggtgccgacgggtggatttgggggagatctggttgtgtgtgtgtgcgctccgaacaacacgaggttggggaaagagggtgtggagggggtgtctatttattacggcgggcgaggaagggaaagcgaaggagcggtgggaaaggaatcccccgtagctgccgtgccgtgagaggaggaggaggccgcctgccgtgccggctcacgtctgccgctccgccacgcaatttctggatgccgacagcggagcaagtccaacggtggagcggaactctcgagaggggtccagaggcagcgacagagatgccgtgccgtctgcttcgcttggcccgacgcgacgctgctggttcgctggttggtgtccgttagactcgtcgacggcgtttaacaggctggcattatctactcgaaacaagaaaaatgtttccttagtttttttaatttcttaaagggtatttgtttaatttttagtcactttattttattctattttatatctaaattattaaataaaaaaactaaaatagagttttagttttcttaatttagaggctaaaatagaataaaatagatgtactaaaaaaattagtctataaaaaccattaaccctaaaccctaaatggatgtactaataaaatggatgaagtattatataggtgaagctatttgcaaaaaaaaaggagaacacatgcacactaaaaagataaaactgtagagtcctgttgtcaaaatactcaattgtcctttagaccatgtctaactgttcatttatatgattctctaaaacactgatattattgtagtactatagattatattattcgtagagtaaagtttaaatatatgtataaagatagataaactgcacttcaaacaagtgtgacaaaaaaaatatgtggtaattttttataacttagacatgcaatgctcattatctctaggcacttttcggggaaatgtgcgcggaacccctatttgtttatttttctaaatacattcaaatatgtatccgctcatgagacaataaccctgataaatgcttcgtttcgactatgacctcgtaccacaccacttccaggctcagaagcagaatcgattcagcagtcactaaccctctctatgcgacagccacgagaattacaaactgggtctgccggacttacatatcaatcaacggaatcacgtccaagtaaaataatccagcgaacttatccacataggatctgaggggggaacgtgaatgagccaggtctacacgcagcatgggagagaaggggggggggggttttcaaatagagtccaaaattagcccaaacgagggagggagaatgaatgaggctgtcgagggcgggcggagatggaacgaagagtcggggggggggggggatagcgaaggcgaagaggctctcacccacccattgcgcttctttgcgaactcgaccaccgaatctctccctcccttccctcttcctctccctctcctctctctctctctctcgtatgtgtgtgtgtgtctaaattcgcccaattcgtcgtcccttccgccatcgccattgccatgccaatcaatgccttagaaacgggcactaccatggcatccccccctttgcatccttggaccctccggagggagggagggagtcaacgttcacactccgaagtcaacctggtcgctagacttttggcttcctctgtttatcttttgtctcggtagatccctcttggaatatatggatggatggatgaaattatggatgaatgattgaatggcatttgtgaaccattcgatccctcctgagtgcctgtgtccgtcagtccgtgtaactgtgactgactgttctatctcatcatccatcctttcttcatgctctactcggactgaactctctctctctctctctctctctctctcgctctgtgtatgtgtgtgtgtgtttgtttattgacttctgaacttgtcatttggttctaatgtagagtgaaagtcgtttaaagcagaatatgcaaatcgtgcattttaagtggtgtaatgtaatgtattttggggtggtgatgtcatgtactaaaaaagggtagcactgaacttgtgtcaatggtagtcagataacaatagattttcgaaatgtatccaagtgttgactttgaaaactgacttgggaaatgaaatgtgatattttcaatggtatttagttttaagttattcattaatagtgtatttttagatgcagtgaaatgttttgttagataaaactctaatcaaatttaaatgcatagcttgagtattctatagtgtcacctaaatagcttggcgtaatcatggtcatagctgtttcctgtgtgaaattgttatccgctcacaattccacacaacatacgagccggaagcataaagtgtaaagcctggggtgcctaatgagtgagctaactcacattaattgcgttgcgctcactgcccgctttccagtcgggaaacctgtcgtgccagctgcattaatgaatcggccaacgcgcggggagaggcggtttgcgtattgggcgctcttccgcttcctcgctcactgactcgctgcgctcggtcgttcggctgcggcgagcggtatcagctcactcaaaggcggtaatacggttatccacagaatcaggggataacgcaggaaagaacatgtgagcaaaaggccagcaaaaggccaggaaccgtaaaaaggccgcgttgctggcgtttttccataggctccgcccccctgacgagcatcacaaaaatcgacgctcaagtcagaggtggcgaaacccgacaggactataaagataccaggcgtttccccctggaagctccctcgtgcgctctcctgttccgaccctgccgcttaccggatacctgtccgcctttctcccttcgggaagcgtggcgctttctcatagctcacgctgtaggtatctcagttcggtgtaggtcgttcgctccaagctgggctgtgtgcacgaaccccccgttcagcccgaccgctgcgccttatccggtaactatcgtcttgagtccaacccggtaagacacgacttatcgccactggcagcagccactggtaacaggattagcagagcgaggtatgtaggcggtgctacagagttcttgaagtggtggcctaactacggctacactagaagaacagtatttggtatctgcgctctgctgaagccagttaccttcggaaaaagagttggtagctcttgatccggcaaacaaaccaccgctggtagcggtggtttttttgtttgcaagcagcagattacgcgcagaaaaaaaggatctcaagaagatcctttgatcttttctacggggtctgacgctcagtggaacgaaaactcacgttaagggattttggtcatgagattatcaaaaaggatcttcacctagatccttttaaattaaaaatgaagttttaaatcaatctaaagtatatatgagtaaacttggtctgacagttaccaatgcttaatcagtgaggcacctatctcagcgatctgtctatttcgttcatccatagttgcctgactccccgtcgtgtagataactacgatacgggagggcttaccatctggccccagtgctgcaatgataccgcgagacccacgctcaccggctccagatttatcagcaataaaccagccagccggaagggccgagcgcagaagtggtcctgcaactttatccgcctccatccagtctattaattgttgccgggaagctagagtaagtagttcgccagttaatagtttgcgcaacgttgttgccattgctacaggcatcgtggtgtcacgctcgtcgtttggtatggcttcattcagctccggttcccaacgatcaaggcgagttacatgatcccccatgttgtgcaaaaaagcggttagctccttcggtcctccgatcgttgtcagaagtaagttggccgcagtgttatcactcatggttatggcagcactgcataattctcttactgtcatgccatccgtaagatgcttttctgtgactggtgagtactcaaccaagtcattctgagaatagtgtatgcggcgaccgagttgctcttgcccggcgtcaatacgggataataccgcgccacatagcagaactttaaaagtgctcatcattggaaaacgttcttcggggcgaaaactctcaaggatcttaccgctgttgagatccagttcgatgtaacccactcgtgcacccaactgatcttcagcatcttttactttcaccagcgtttctgggtgagcaaaaacaggaaggcaaaatgccgcaaaaaagggaataagggcgacacggaaatgttgaatactcatactcttcctttttcaatattattgaagcatttatcagggttattgtctcatgagcggatacatatttgaatgtatttagaaaaataaacaaataggggttccgcgcacatttccccgaaaagtgccacctgatgcggtgtgaaataccgcacagatgcgtaaggagaaaataccgcatcaggaaattgtaagcgttaatattttgttaaaattcgcgttaaatttttgttaaatcagctcattttttaaccaataggccgaaatcggcaaaatcccttataaatcaaaagaatagaccgagatagggttgagtgttgttccagtttggaacaagagtccactattaaagaacgtggactccaacgtcaaagggcgaaaaaccgtctatcagggcgatggcccactacgtgaaccatcaccctaatcaagttttttggggtcgaggtgccgtaaagcactaaatcggaaccctaaagggagcccccgatttagagcttgacggggaaagccggcgaacgtggcgagaaaggaagggaagaaagcgaaaggagcgggcgctagggcgctggcaagtgtagcggtcacgctgcgcgtaaccaccacacccgccgcgcttaatgcgccgctacagggcgcgtccattcgccattcaggctgcgcaactgttgggaagggcgatcggtgcgggcctcttcgctattacgccagctggcgaaagggggatgtgctgcaaggcgattaagttgggtaacgccagggttttcccagtcacgacgttgtaaaacgacggccagtgaattgtaatacgactcactata

SEQ ID NO: 214 - DNA, 12114 bp, Artificial Sequence; identical to SEQ ID NO: 213
  pTZ35Sgateway vector

SEQ ID NO: 215 - DNA, 10446 bp, Artificial Sequence
  pTN2X35Sgateway vector
gggcgaattgggcccgacgtcgcatgcatttaaataaactctgcatgggagtgtcgaattctggcagacctgcttgctctcgttgatggggcttaagctgctgcatgattgtcgaatctgatgacgttgaattcttaacccctggtatggggtagccaatgtcttcaatcccatggaacctatacctttgtgatgtattaaatgccttcattgtagcagctatgatgtttactccactgaagggtgtagccacaatgcaggcttgagaaatttctttatataaacttgcatgatgaaggtcaattatgattgcaagccttgaaaccccgtacagaggctcatcacactcgaagcattcagatagcttactaaaatatacctgccagtgctttagggttgtagttgcctgcaattcttttacagcttgagtgatggtagggtgtcagtactggcaagtgatatgatcggtagatttacatctgcaggtgaggtgacgctgctaacttccctatacctgcttgatttggtgtcacttgcttgcttggccgctattttttcgagtttaaatttagccatggtttgatgtgttaacctactcagtttcttcgtgaatctttggctcattcgctgctctatatgtacgattggaaagatttttttaagaaagtcgacatcaggttgcttgtttgagtttcttattctgcgaacgtgaaatgcaattcacgcctaacttgaagagcagggaatgaattgtcgagttccgtttgtggtgaagattccaacaaatagtgtgccaacttctcttaaactcctaattatatttggaagttctgctttgttacttgattggcagtccttcaaggaaagagacatactgctgttctctgttattggcaggctcagagctgctaccagataaacaaaattgaacttcatactctgtcccttcacaatcaagccctaatccttcaaatggcaccactaaaacaggtgggttacgccaaattcttcacagcgtaaggctctcagacgccaatagagcttatgatttacgcttgtccatacctgcacaaaaattacataacagatgaaaaggctgtaattgcaactaccgaggatcagaatgaagcttctgtcctcaccgtgcatacagacttcgcagatgagcccacgtaagaaagttattgcagcatttctaaaaaaaacccctaacttcctgttaatccccactcgaaagtacgtgcgttgtacctaatggataatacattcacgacaaagatttcaacaaaaactgcaaaagttcacacatgattgtcgaatggtacgcaaacagcggccggcaaggctcttcatttggcacgtactctcaattatccatccatccctggttatggaactcatccgtttgttgttggaaatgcataggcgaatgggctcggatcgagaggtgtcgcccgtcacgcgaggacgcaaggagcgagaggacgagtggcgttgaatttggggccgaaggatggtggtcgtctgctccgcgggaattcctgcagcccggccgctaataacttcgtatagcatacattatacgaagttatattaattccctttcagaaagaatgctaacccacagatggttagagaggcttacgcagcaggtctcatcaagacgatctacccgagcaataatctccaggaaatcaaataccttcccaagaaggttaaagatgcagtcaaaagattcaggactaactgcatcaagaacacagagaaagatatatttctcaagatcagaagtactattccagtatggacgattcaaggcttgcttcacaaaccaaggcaagtaatagagattggagtctctaaaaaggtagttcccactgaatcaaaggccatggagtcaaagattcaaatagaggacctaacagaactcgccgtaaagactggcgaacagttcatacagagtctcttacgactcaatgacaagaagaaaatcttcgtcaacatggtggagcacgacacacttgtctactccaaaaatatcaaagatacagtctcagaagaccaaagggcaattgagacttttcaacaaagggtaatatccggaaacctcctcggattccattgcccagctatctgtcactttattgtgaagatagtggaaaaggaaggtggctcctacaaatgccatcattgcgataaaggaaaggccatcgttgaagatgcctctgccgacagtggtcccaaagatggacccccacccacgaggagcatcgtggaaaaagaagacgttccaaccacgtcttcaaagcaagtggattgatgtgatatctccactgacgtaagggatgacgcacaatcccactatccttcgcaagacccttcctctatataaggaagttcatttcatttggagaggggatccatggccaagttgaccagtgccgttccggtgctcaccgcgcgcgacgtcgccggagcggtcgagttctggaccgaccggctcgggttctcccgggacttcgtggaggacgacttcgccggtgtggtccgggacgacgtgaccctgttcatcagcgcggtccaggaccaggtggtgccggacaacaccctggcctgggtgttggtgcgcggcctggacgagctgtacgccgagtggtcggaggtcgtgtccacgaacttccgggacgcctccgggccggccatgaccgagatcggcgagcagccgtgggggcgggagttcgccctgcgcgacccggccggcaactgcgtgcacttcgtggccgaggagcaggactgagcgggactctggggttcggacggtacgctgaaatcaccagtctctctctacaaatctatctctctctattttctccataaataatgtgtgagtagtttcccgataagggaaattagggttcttatagggtttcgctcatgtgttgagcatataagaaacccttagtatgtatttgtatttgtaaaatacttctatcaataaaatttctaattcctaaaaccaaaatccagtactaaaatccagatctcctaaagtccctatagatctttgtcgtgaatataaaccagacacgagacgactaaacctggagcccagacgccgttcgaagctagaagtaccgcttaggcaggaggccgttagggaaaagatgctaaggcagggttggttacgttgactcccccgtaggtttggtttaaatatgatgaagtggacggaaggaaggaggaagacaaggaaggataaggttgcaggccctgtgcaaggtaagaagatggaaatttgatagaggtacgctactatacttatactatacgctaagggaatgcttgtatttataccctataccccctaataaccccttatcaatttaagaaataatccgcataagcccccgcttaaaaattggtatcagagccatgaataggtctatgaccaaaactcaagaggataaaacctcaccaaaatacgaaagagttcttaactctaaagataaaagatctttcaagatcaaaactagttccctcacaccggtgacggggatccactagttctagctaatgtgtgagtagtttcccgataagggaaattagggttcttatagggtttcgctcatgtgttgagcatataagaaacccttagtatgtatttgtatttgtaaaatacttctatcaataaaatttctaattcctaaaaccaaaatccagtactaaaatccagatccccgggtacgatcccccggccgctaataacttcgtatagcatacattatacgaagttatattctagggccgccaccatcgaattcgcggccaacctactccaaaaatatcaaagatacagtctcagaagaccaaagggcaattgagacttttcaacaaagggtaatatccggaaacctcctcggattccattgcccagctatctgtcactttattgtgaagatagtggaaaaggaaggtggctcctacaaatgccatcattgcgataaaggaaaggccatcgttgaagatgcctctgccgacagtggtcccaaagatggacccccacccacgaggagcatcgtggaaaaagaagacgttccaaccacgtcttcaaagcaagtggattgatgtgatatctccactgacgtaagggatgacgcacaatcccactatccttcgcaagacccttcctctatataaggaagttcatttcatttggagaggccagtgccaagttaattcgagctccaccgcggtggcggccgctctagaactagtggatcccccgtaatcacaagtttgtacaaaaaagctgaacgagaaacgtaaaatgatataaatatcaatatattaaattagattttgcataaaaaacagactacataatactgtaaaacacaacatatccagtcatattggcggccgcattaggcaccccaggctttacactttatgcttccggctcgtataatgtgtggattttgagttaggatccgtcgagattttcaggagctaaggaagctaaaatggagaaaaaaatcactggatataccaccgttgatatatcccaatggcatcgtaaagaacattttgaggcatttcagtcagttgctcaatgtacctataaccagaccgttcagctggatattacggcctttttaaagaccgtaaagaaaaataagcacaagttttatccggcctttattcacattcttgcccgcctgatgaatgctcatccggaattccgtatggcaatgaaagacggtgagctggtgatatgggatagtgttcacccttgttacaccgttttccatgagcaaactgaaacgttttcatcgctctggagtgaataccacgacgatttccggcagtttctacacatatattcgcaagatgtggcgtgttacggtgaaaacctggcctatttccctaaagggtttattgagaatatgtttttcgtctcagccaatccctgggtgagtttcaccagttttgatttaaacgtggccaatatggacaacttcttcgcccccgttttcaccatgggcaaatattatacgcaaggcgacaaggtgctgatgccgctggcgattcaggttcatcatgccgtttgtgatggcttccatgtcggcagaatgcttaatgaattacaacagtactgcgatgagtggcagggcggggcgtaaacgcgtggatccggcttactaaaagccagataacagtatgcgtatttgcgcgctgatttttgcggtataagaatatatactgatatgtatacccgaagtatgtcaaaaagaggtatgctatgaagcagcgtattacagtgacagttgacagcgacagctatcagttgctcaaggcatatatgatgtcaatatctccggtctggtaagcacaaccatgcagaatgaagcccgtcgtctgcgtgccgaacgctggaaagcggaaaatcaggaagggatggctgaggtcgcccggtttattgaaatgaacggctcttttgctgacgagaacaggggctggtgaaatgcagtttaaggtttacacctataaaagagagagccgttatcgtctgtttgtggatgtacagagtgatattattgacacgcccgggcgacggatggtgatccccctggccagtgcacgtctgctgtcagataaagtctcccgtgaactttacccggtggtgcatatcggggatgaaagctggcgcatgatgaccaccgatatggccagtgtgccggtctccgttatcggggaagaagtggctgatctcagccaccgcgaaaatgacatcaaaaacgccattaacctgatgttctggggaatataaatgtcaggctcccttatacacagccagtctgcaggtcgaccatagtgactggatatgttgtgttttacagcattatgtagtctgttttttatgcaaaatctaatttaatatattgatatttatatcattttacgtttctcgttcagctttcttgtacaaagtggtgtacgggctgcaggaattcgatatcaagcttatcgataccgtcgacctcgagggggggcccggtacccctactccaagatcgttcaaacatttggcaataaagtttcttaagattgaatcctgttgccggtcttgcgatgattatcatataatttctgttgaattacgttaagcatgtaataattaacatgtaatgcatgacgttatttatgagatgggtttttatgattagagtcccgcaattatacatttaatacgcgatagaaaacaaaatatagcgcgcaaactaggataaattatcgcgcgcggtgtcatctatgttactagatcgggttggccgcctgcaggtcgaccatatgggagagctcggatccactagtaacggccgccagtgtgctggaattcgcccttgtcgacgttaacatcctttcgaaatctccttggaatcattggaataggtagatctcaaaatgtatttgattaggtcgatgaaatatactgttaccacgaagtaggtgcgtgaggttcaatatgatgggggttccatataggctattggagctatgcaagtaaatattgatctcaatttgcatttacctgtctgcattatgatccatgggtgatctatagagtcgtcgaagtatggtttctctgtccggttacagattatgaacttatataaaatgattgttgcttgtgttcctttgtcgcaggtccatcattcatcagttaaggttgatccagaaacgcaacatgcatgcagttgtccaattcttcctctaaaaagtcacataagaggacctgctcccagtgctgaagcaggtatatcttcgcaatattaatctgataatttatcggtcatcgtgctctagtttatgattcatgcattgaatgaaggtttttatgatcttcgcatgcacctatcgcgggatttactgatcacttacaggaattgtctatgttatctatgtaaccaggtagcacagacattattgatgaggctatcaacttcttccgggctaatgtactatttaggaagttcgaagtcaaaggttctgcggacaagttgcttgtttacttgactctgtacataaacatggcccttaaacgcattgaggcatgcaaaacggaggctgatggcgtgaaggccatcattaacctagggctagagaagtttcccattcctggtgaacctgggtttcctttgggaggcctatttactgcccgcagacaaaggaagaaggaggtaactaattttctattaccgctgtaatctgtcatgatgaagtgaatcttttttgatagcttgttccatcgagagtctgtaatccttctgcctcgaaggtttgttctgatagaataccgtctaggcaatcgaatgcatgcagcagtgcgcttggattaacgaaggttgtgtggctgtctgcagacttattgcgtaactacttcaagcaagtgcgggaagagactagtggaaggttgatggagaaagtatatcgccgaaatggcacacccaacaagtggtggctggcatttaaatgagctcccaacgcgttggatgcatagcttgagtattctatagtgtcacctaaatagcttggcgtaatcatggtcatagctgtttcctgtgtgaaattgttatccgctcacaattccacacaacatacgagccggaagcataaagtgtaaagcctggggtgcctaatgagtgagctaactcacattaattgcgttgcgctcactgcccgctttccagtcgggaaacctgtcgtgccagctgcattaatgaatcggccaacgcgcggggagaggcggtttgcgtattgggcgctcttccgcttcctcgctcactgactcgctgcgctcggtcgttcggctgcggcgagcggtatcagctcactcaaaggcggtaatacggttatccacagaatcaggggataacgcaggaaagaacatgtgagcaaaaggccagcaaaaggccaggaaccgtaaaaaggccgcgttgctggcgtttttccataggctccgcccccctgacgagcatcacaaaaatcgacgctcaagtcagaggtggcgaaacccgacaggactataaagataccaggcgtttccccctggaagctccctcgtgcgctctcctgttccgaccctgccgcttaccggatacctgtccgcctttctcccttcgggaagcgtggcgctttctcatagctcacgctgtaggtatctcagttcggtgtaggtcgttcgctccaagctgggctgtgtgcacgaaccccccgttcagcccgaccgctgcgccttatccggtaactatcgtcttgagtccaacccggtaagacacgacttatcgccactggcagcagccactggtaacaggattagcagagcgaggtatgtaggcggtgctacagagttcttgaagtggtggcctaactacggctacactagaagaacagtatttggtatctgcgctctgctgaagccagttaccttcggaaaaagagttggtagctcttgatccggcaaacaaaccaccgctggtagcggtggtttttttgtttgcaagcagcagattacgcgcagaaaaaaaggatctcaagaagatcctttgatcttttctacggggtctgacgctcagtggaacgaaaactcacgttaagggattttggtcatgagattatcaaaaaggatcttcacctagatccttttaaattaaaaatgaagttttaaatcaatctaaagtatatatgagtaaacttggtctgacagttaccaatgcttaatcagtgaggcacctatctcagcgatctgtctatttcgttcatccatagttgcctgactccccgtcgtgtagataactacgatacgggagggcttaccatctggccccagtgctgcaatgataccgcgagacccacgctcaccggctccagatttatcagcaataaaccagccagccggaagggccgagcgcagaagtggtcctgcaactttatccgcctccatccagtctattaattgttgccgggaagctagagtaagtagttcgccagttaatagtttgcgcaacgttgttgccattgctacaggcatcgtggtgtcacgctcgtcgtttggtatggcttcattcagctccggttcccaacgatcaaggcgagttacatgatcccccatgttgtgcaaaaaagcggttagctccttcggtcctccgatcgttgtcagaagtaagttggccgcagtgttatcactcatggttatggcagcactgcataattctcttactgtcatgccatccgtaagatgcttttctgtgactggtgagtactcaaccaagtcattctgagaatagtgtatgcggcgaccgagttgctcttgcccggcgtcaatacgggataataccgcgccacatagcagaactttaaaagtgctcatcattggaaaacgttcttcggggcgaaaactctcaaggatcttaccgctgttgagatccagttcgatgtaacccactcgtgcacccaactgatcttcagcatcttttactttcaccagcgtttctgggtgagcaaaaacaggaaggcaaaatgccgcaaaaaagggaataagggcgacacggaaatgttgaatactcatactcttcctttttcaatattattgaagcatttatcagggttattgtctcatgagcggatacatatttgaatgtatttagaaaaataaacaaataggggttccgcgcacatttccccgaaaagtgccacctgatgcggtgtgaaataccgcacagatgcgtaaggagaaaataccgcatcaggaaattgtaagcgttaatattttgttaaaattcgcgttaaatttttgttaaatcagctcattttttaaccaataggccgaaatcggcaaaatcccttataaatcaaaagaatagaccgagatagggttgagtgttgttccagtttggaacaagagtccactattaaagaacgtggactccaacgtcaaagggcgaaaaaccgtctatcagggcgatggcccactacgtgaaccatcaccctaatcaagttttttggggtcgaggtgccgtaaagcactaaatcggaaccctaaagggagcccccgatttagagcttgacggggaaagccggcgaacgtggcgagaaaggaagggaagaaagcgaaaggagcgggcgctagggcgctggcaagtgtagcggtcacgctgcgcgtaaccaccacacccgccgcgcttaatgcgccgctacagggcgcgtccattcgccattcaggctgcgcaactgttgggaagggcgatcggtgcgggcctcttcgctattacgccagctggcgaaagggggatgtgctgcaaggcgattaagttgggtaacgccagggttttcccagtcacgacgttgtaaaacgacggccagtgaattgtaatacgactcactata
